(19) United States
(12) Patent Application Publication
(10) Pub. No.: US 2013/0164329 A1
(43) Pub. Date: Jun. 27, 2013

(54) CELL-BASED METHODS AND REAGENTS

(71) Applicants: Anthony Rossomando, Cambridge, MA (US); John M. Maraganore, Cambridge, MA (US); Stuart Pollard, Cambridge, MA (US); Muthiah Manoharan, Cambridge, MA (US)

(72) Inventors: Anthony Rossomando, Cambridge, MA (US); John M. Maraganore, Cambridge, MA (US); Stuart Pollard, Cambridge, MA (US); Muthiah Manoharan, Cambridge, MA (US)

(73) Assignee: Alnylam Pharmaceuticals, Inc., Cambridge, MA (US)

(21) Appl. No.: 13/578,886

(22) PCT Filed: Feb. 16, 2011
(86) PCT No.: PCT/US11/25010

§ 371 Date: Mar. 11, 2013

Related U.S. Application Data
(60) Provisional application No. 61/305,284, filed on Feb. 17, 2010.
(60) Provisional application No. 61/319,578, filed on Mar. 31, 2010.
(60) Provisional application No. 61/319,589, filed on Mar. 31, 2010.
(60) Provisional application No. 61/320,840, filed on Apr. 5, 2010.
(60) Provisional application No. 61/321,815, filed on Apr. 7, 2010.
(60) Provisional application No. 61/322,077, filed on Apr. 8, 2010.
(60) Provisional application No. 61/324,624, filed on Apr. 15, 2010.

(51) Int. Cl. C12N 7/02; C12N 7/00; G01N 33/569; C12N 1/20; C12N 1/10; C12Q 1/70; A61K 39/15

(52) U.S. Cl. CPC C12N 7/02; C12Q 1/701; C12N 7/00; A61K 39/15; C12N 1/20; C12N 1/10; G01N 33/56983
USPC 424/215.1; 435/5; 435/239; 435/235.1; 435/252.1; 435/258.1; 435/253.1; 435/258.2; 435/258.3

(57) ABSTRACT

The present invention relates to compositions and methods for isolating cells devoid of unwanted viral contaminants, and to methods for preparing a virus stock substantially devoid of viral contaminants. Virus stocks, cells, and immunogenic reagents produced using such methods are also provided.

### RELATED APPLICATIONS

[0001] This application claims the benefit of U.S. Provisional Patent Application No. 61/305,284, filed Feb. 17, 2010, entitled BIOPROCESSING; U.S. Provisional Patent Application No. 61/319,578, filed Mar. 31, 2010, entitled CELL-BASED BIOPROCESSING; U.S. Provisional Patent Application No. 61/319,589, filed Mar. 31, 2010, entitled CELL-BASED BIOPROCESSING; U.S. Provisional Patent Application No. 61/320,840, filed Apr. 5, 2010, entitled CELL-BASED BIOPROCESSING; U.S. Provisional Patent Application No. 61/321,815, filed Apr. 7, 2010, entitled CELL-BASED METHODS AND REAGENTS; U.S. Provisional Patent Application No. 61/322,077, filed Apr. 8, 2010, entitled CELL-BASED METHODS AND REAGENTS; and U.S. Provisional Patent Application No. 61/324,624, filed Apr. 15, 2010, entitled CELL-BASED METHODS AND REAGENTS; each of which is incorporated in their entirety herein by reference.

### FIELD OF THE INVENTION

[0002] The present invention relates to compositions and methods for isolating cells devoid of unwanted viral contaminants, and to methods for preparing a virus stock substantially devoid of viral contaminants. Virus stocks, cells, and immunogenic reagents produced using such methods are also provided.

### BACKGROUND

[0003] Cell culture techniques are used to manufacture a wide range of biological products, including biopharmaceuticals, vaccines biofuels, metabolites, vitamins, and nutraceuticals. Large-scale cell culture operations for biotechnology products use millions of liters of complex media and gases as well as huge quantities of organic and inorganic raw materials. A number of strategies have been developed to enhance productivity, yield, efficiency, and other aspects of cell-based bioprocesses in order to facilitate industrial scale production and meet applicable standards for product quality and consistency.

[0004] Endogenous risk factors, such as viral agents, remain a concern in the production of therapeutics and vaccines in cell culture. For example, latent DNA viruses (such as herpesviruses) and endogenous retroviruses (ERVs), or retroviral elements are likely present in all vertebrates. Endogenous retroviral sequences are an integral part of eukaryotic genomes, and although the majority of these sequences are defective, some can produce infectious virus, either spontaneously or upon long-term culture. ERV virus production can also be induced upon treatment with various chemical or other agents that may be part of the normal production system. Additionally, although many endogenous retroviruses do not readily re-infect their own cells, they can infect other species in vitro and in vivo. For example, two of three subgroups of pig ERVs (PERVs), can infect human cells in vitro.

[0005] There are at least twenty-six distinct groups of human endogenous retroviruses (HERVs); and mouse, cat, and pig harbor replication-competent ERVs that are capable of interacting with related exogenous virus. Retrovirus-induced tumorigenesis can involve the generation of a novel pathogenic virus by recombination between replication-competent and -defective sequences and/or activation of a cellular oncogene by a long terminal repeat (LTR) due to upstream or downstream insertion of retrovirus sequences. Thus, the activation of an endogenous, infectious retrovirus in a cell substrate that is used for the production of biologics is an important safety concern, especially in the case of live, viral vaccines, where minimal purification and inactivation steps are used in order to preserve high vaccine potency.

[0006] Adventitious viruses represent a major risk associated with the use of cell-substrate derived biologicals, including vaccines and antibodies, for human use. The possibility for viral contamination exists in primary cultures and established cultures, as well as Master Cell Banks, end-of-production cells, and bulk harvest fluids. For example, this is a major obstacle to the use of neoplastic-immortalized cells for which the mechanism of transformation is unknown, because these could have a higher risk of containing oncogenic viruses. Extensive testing for the presence of potential extraneous agents is therefore required to ensure the safety of the vaccines. The most common scenarios for adventitious viral contamination of biologics include bovine viral diarrhoea virus in foetal bovine serum; porcine parvovirus in porcine substrates; and murine minute virus, reovirus, vesivirus and Cache Valley virus in Chinese hamster cell-derived bulk harvests. The three last-named viral entities are believed to be introduced via bovine serum used during the manufacturing process (during scale-up or during the entire process).

[0007] During the production of live attenuated viral vaccines, removal of contaminating viral particles, nucleic acid, or proteins is problematic because any antiviral approach must leave the viral product intact and immunogenic. Indeed, endogenous avian viral particles have been found in commercially released human measles and mumps vaccines derived from chicken embryo fibroblasts. Moreover, endogenous viral proteins, particularly envelop proteins, often inhibit the efficiency of recombinant viral vectors used in creating transformed cell lines. Further, endogenous virus may aggravate the immune response of the host cell, often triggered during viral production or retroviral transduction. Hence, there remains a need for techniques to obtain reagents, e.g. virus stocks, or cells, that are substantially devoid of viral contaminants.

### SUMMARY

[0008] Embodiments of the present invention provide for methods and compositions for preparing a virus stock or viral sample that is substantially devoid of unwanted viral contaminants. In one aspect, the method comprises contacting a seed stock or sample containing desired virus with an agent (e.g., a receptor, an antibody, or an antigen binding fragment thereof) that binds unwanted viral contaminants, but does not bind the desired virus; and collecting the unbound desired virus. In one embodiment, the binding agent is a cell-surface receptor for the unwanted viral contaminant. In one embodiment, the cell-surface receptor for the unwanted viral contaminant is heparin. In another embodiment, expression of the cell-surface receptor in the cell has been increased using a RNA effector molecule(s). In a particular embodiment, the cell expression of heparin sulfate is increased using a RNA effector molecule that targets the heparanase gene. The cell can be a cell that does not express receptor(s) that bind the desired virus. In another embodiment, expression of the receptor(s) that bind to the desired virus in the cell has been decreased using an RNA effector molecule(s). In another embodiment of the invention, the unwanted virus-binding agent is an immobilized agent. The agent is capable of specifically binding the unwanted virus. Examples include heparin (heparin sulfate) or an antibody. In a specific embodiment, the binding agent is heparin sulfate, and the unwanted viral contaminant is porcine circovirus type 1(PCV1).

[0009] In a further embodiment of the invention, the unwanted virus-binding agent is a cell comprising a cell-surface receptor for the unwanted viral contaminant, for which expression has been increased using RNA effector molecule(s), and for which presence of a cell-surface receptor for the desired virus has been decreased. The decreased presence of the cell-surface receptor for the desired virus can be achieved using the RNA effector molecule(s) of the present invention, or by known techniques (e.g., enzymatic treatment). In a specific embodiment, the cell expression of heparin is increased using a RNA effector molecule that targets the heparanase gene, and the presence of cell-surface sialic acid is decreased by treatment of the cell with sialidase. In another specific embodiment, the cell expression of heparin is increased using a RNA effector molecule that targets the heparanase gene, and the presence of cell-surface sialic acid is decreased using a RNA effector molecule. In one embodiment, the RNA effector is selected to reduce cell-surface sialic acid content. In a particular embodiment, the RNA effector targets a gene selected from the group consisting of: UDP-GlcNAc 2-Epimerase (GNE), Sialic acid synthase (SAS), CMP-Neu5Ac synthetase (CMPNS), a Sialyltransferase, and N-acylneuraminate-9-phosphatase (3.1.3.29). In one embodiment, the unwanted viral contaminant is PCV1, and the desired virus is rotavirus.

[0010] Another aspect of the present invention provides for a method of enriching for a desired virus comprising propagating the virus in cells in which a receptor for a suspected viral contaminant has been inhibited; and collecting the desired virus. In one embodiment, the viral contaminant is PCV1 and the receptor is heparin, for which expression is decreased using a RNA effector molecule targeting the xylosyltransferase gene. In an additional embodiment, the method further comprises contacting the cells during propagation with an RNA effector molecule that targets a gene from PCV1 (for example PVC1 rep and/or cap genes), such that replication of PCV1 is inhibited. In another embodiment, the desired virus is rotavirus.

[0011] In additional aspects, the present invention provides for a method for isolating a cell that is substantially devoid of a target (e.g., contaminating) virus. The method comprises: (a) contacting a population of cells, a portion of which comprises the target virus with a RNA effector molecule that inhibits the growth or replication of the target virus; (b) detecting the presence of the target virus in each cell; and (c) isolating at least one cell that is substantially devoid of the target virus.

[0012] In one embodiment, the method further comprises repeating steps (a)-(c).

[0013] In another embodiment, the method further comprises detecting the presence or absence of target viral nucleic acid or protein (e.g., detect inhibition of transcription and/or translation). The presence or absence of the target virus, viral nucleic acid or protein can be detected, for example, by phenol emulsion DNA reassociation technique (PERT), polymerase chain reaction (PCR), Mass Spectrometry, reverse transcription polymerase chain reaction (RT-PCR), rapid amplification of cDNA ends (RACE), electrophoretic methods, immunofluorescence, dot blot hybridization, Northern hybridization, Southern hybridization, radioimmunoassay, competitive-binding assay, ELISA, Western blot, fluorescence activated cell sorting (FACS), immunohistochemistry, immunoprecipitation, proteomics, mass spectrometry, electrophoresis, immunofluoresence and the like.

[0014] In one embodiment, the target virus is a non-integrating virus.

[0015] In another embodiment, the target virus is selected from the group consisting of: hepatitis B virus (HBV), hepatitis C virus (HCV), Epstein Barr virus (EBV), human T-lymphotropic virus (HTLV), reovirus type 3 (Reo3), Sendai virus, feline sarcoma virus, human papillomavirus (HPV), hantavirus, Marburg virus, lactic dehydrogenase virus (DHM), lymphocytic choriomeningitis Virus (LCM), minute virus of mice (MVM), mouse adenovirus (MAV), mouse cytomegalovirus (MCMV), mouse rotavirus (EDIM), pneumonia virus of mice (PVM), pseudorabies virus (PRV), murine leukemia virus (MuLV), Semliki Forest virus (SFV), vesivirus, Kilham rat virus (KRV), Toolan virus (HI), bovine viral diarrhea virus (BVDV), infectious bovine rhinotracheitis virus, parainfluenza virus type 3, simian virus 40 (SV40), simian virus 5 (sv5), and simian virus 20 (SV20). In still another embodiment, the target virus is a porcine circovirus (PCV).

[0016] In another embodiment, the method further comprises (a) contacting the unbound virus stock with a host cell; (b) contacting the cell with an RNA effector molecule that inhibits growth or replication of the unwanted target virus; and (c) isolating the virus stock from the medium. The steps can be performed in any order. In one embodiment, the host cell does not have a receptor for the unwanted target virus.

[0017] The isolated cell is substantially devoid of a target virus. In one embodiment, the isolated cell contains at least 90%, for example at least 95%, at least 99%, at least 99.9%, or at least 99.99% reduced amount of detectable virus, viral particles or viral nucleic acid when compared with the initial cell population. In another embodiment, the isolated cell is free of the target virus.

[0018] In another embodiment, steps of the method are repeated as long as target viral DNA or protein is detected. In still another embodiment, the steps are repeated until the virus is no longer detectable.

[0019] The method contemplates the use of any method known in the art for detecting the presence of the target virus (contaminating virus) associated with the cell, including immunological methods (western blotting, immunofluorescence, fluorescence activated cell sorting (FACS), etc.). For example, an antibody that recognizes an epitope of the target virus can be used. In one such embodiment, the presence of the target virus is detected using an antibody against a capsid protein (Cap). Non-limiting examples of such antibodies useful for target virus detection include those described in Tischer et al., 140 Archiv. Virol. 1427-39 (1995).

[0020] In another embodiment, the cell further comprises a second virus. The second virus can be useful for production of an immunogenic agent. In one embodiment, the second virus is an attenuated virus. The method can further comprise detecting the presence of the second virus. The second virus can include any number of viruses that can be used in the production of an immunogenic agent. In one embodiment, the second virus is a rotavirus. The second virus can be detected by any method known in the art, including immunological methods to detect viral protein (western blotting, immunofluorescence, fluorescence activated cell sorting (FACS), etc), methods to detect viral nucleic acid (e.g., PERT, PCR, RT-PCR, RACE, etc). For example, an antibody that recognizes an epitope within the target virus can be used.

[0021] In one embodiment, the RNA effector molecule is an siRNA. In another embodiment, the RNA effector molecule is at least partly complementary to a portion of the target virus. In still another embodiment, the target virus is a porcine circovirus (for example, as described herein in Table 2, or as described in Sun et al., 123 Veterin. Microbiol. 203-09 (2007). In a further embodiment, the RNA effector molecule is detectably labeled. For example, the RNA effector molecule can be labeled with a fluorophore (e.g., Cy3, ALEXA FLUOR® dyes, fluorescein, etc). In another embodiment, the method further comprises detecting the presence of the RNA effector molecule in the cell. In one particular embodiment, cells with detectably labeled RNA effector molecules and without detectable target virus are isolated.

[0022] In another aspect, the invention provides for a cell that is substantially devoid of a target virus. The cell can be obtained by any of the processes described herein.

[0023] The cell thus isolated can be used in the manufacture of a biologic, for example, an immunogenic agent. Therefore, in another aspect, the present invention provides for a method of producing an immunogenic agent, comprising culturing the cell that is substantially devoid of a target virus and produced by any of the processes described herein under conditions that allow expression of the immunogenic agent; and, isolating the immunogenic agent.

[0024] The present invention provides for compositions and methods for producing an immunogenic agent in a host cell, comprising introducing into the host cell at least one oligonucleotide (e.g., a RNA effector molecule), a portion of which is complementary to at least one nucleic acid-based entity (e.g., a target gene); maintaining the host cell for a time sufficient to modulate expression of the at least one nucleic acid-based entity (e.g., a target gene), wherein the modulation of expression inhibits expression of latent, adventitious, and/or endogenous virus, and enhances production of an immunogenic agent in the host cell; and isolating the immunogenic agent from the host cell.

[0025] More specifically, some embodiments of the present invention relate to initiating RNA interference in a host cell, during or after microbial inoculation or vector transduction, to inhibit expression of endogenous, latent or adventitious virus that compromises the yield and/or quality of the harvested immunogenic agent. For example, an embodiment administers a siRNA or shRNA in naked, conjugated or formulated (e.g., lipid nanoparticle) form that targets an endogenous, latent or adventitious virus pathway (e.g., ev loci of endogenous avian leukosis virus (ALV-E) in avian cells; endogenous type C retrovirus-like particle genomes in Chinese Hamster Ovary (CHO) cells; or the rep gene of porcine circovirus type 1 (PCV-1) in Vero cells), and thereby increases quality and/or yield of the desired immunogenic agent.

[0026] In some embodiments of the invention, with regard to RNAi formulations, simple (naked siRNA in saline or similar solutions or formulations), conjugated (e.g., cholesterol or other targeting ligands) as well as LNP or alternate polymer formulations or delivery vehicles as well as plasmid or viral vectors for shRNA can be used.

[0027] In addition, the formulations can be co-formulated or incorporated into the infective seed or vectors themselves to facilitate delivery or stabilize RNAi materials to the relevant cell where the agent/vector can produce the desired product.

[0028] In some embodiments, the oligonucleotide (e.g., RNA effector molecule) can inhibit a target gene. In other embodiments, the RNA effector can activate a target gene. In particular embodiments, the target gene is associated with endogenous, adventitious or latent herpesviruses, polyomaviruses, hepadnaviruses, papillomaviruses, adenoviruses, poxviruses, bornaviruses, retroviruses, arenaviruse, orthomyxoviruses, paramyxoviruses, reoviruses, picornaviruses, flaviviruses, rabdoviruses, hantaviruses, circoviruses, or vesiviruses.

[0029] Particular endogenous and latent viruses that can be targeted by the methods of the present invention include Minute Virus of Mice (MVM), Murine leukemia/sarcoma (MLV), Circoviruses including porcine circovirus (PCV-1, PCV-2), Human herpesvirus 8 (HHV-8), arenavirus Lymphocytic choriomeningitis virus (LCMV), Lactate dehydrogenase virus (LDH or LDV), human species C adenoviruses, avian adeno-associated virus (AAV), primate endogenous retrovirus family K (ERV-K), and human endogenous retrovirus K (HERV-K).

[0030] Further regarding ERVs, in embodiments of the present invention the target genes of ERVs can be those of primate/human Class I Gamma ERVs pt01-Chr10r-17119458, pt01-Chr5-53871501, BaEV, GaLV, HERV-T, ERV-3, HERV-E, HERV-ADP, HERV-I, MER4like, HERV-FRD, HERV-W, HERVH-RTVLH2, HERVH-RGH2, HERV-Hconsensus, HERV-Fc1; primate/human Epsilon ERV hg15-chr3-152465283; primate/human Intermediate (epsilon-like) HERVL66; primate/human Class III Spuma-like ERVs HSRV, HFV, HERV-S, HERV-L, HERVL40, HERVL74; primate/human Delta ERVs HTLV-1, HTLV-2; primate/human Lenti ERVs HIV-1, HIV-2; primate/human Class II, Beta ERV MPMV, MMTV, HML1, HML2, HML3, HML4, HML7, HML8, HML5, HML10, HML6, or HML9.

[0031] In other embodiments of the present invention, the ERV is selected from rodent Class II, Beta ERV MMTV; rodent Class I Gamma ERV MLV; feline Class I Gamma ERV FLV; ungulate Class I Gamma ERV PERV; ungulate Delta ERV BLV; ungulate lentivirus Visna, EIAV; ungulate Class II, Beta ERV JSRV; avian Class III, Spuma-like ERVs gg01-chr7-7163462; gg01-chrU-52190725, gg01-Chr4-48130894; avian Alpha ERVs ALV, gg01-chr1-15168845; avian Intermediate Beta-like ERVs gg01-chr4-77338201; gg01-ChrU-163504869, gg01-chr7-5733782; Reptilian Intermediate Beta-like ERV Python-molurus; Fish Epsilon ERV WDSV; fish Intermediate (epsilon-like) ERV SnRV; Amphibian Epsilon ERV Xen1; Insect Errantivirus ERV Gypsy.

[0032] Other embodiments of the present invention target adventitious viruses of animal-origin, such as vesivirus, circovirus, hantaan virus, Marburg virus, SV40, SV20, Semliki Forest virus (SFV), simian virus 5 (sv5), lymphocytic choriomeningitis virus, feline sarcoma virus, porcine parvovirus, adenoassociated viruses (AAV), mouse hepatitis virus (MHV), murine leukemia virus (MuLV), pneumonia virus of mice (PVM), Theiler's encephalomyelitis virus (THEMV), murine minute virus (MMV or MVM), mouse adenovirus (MAV), mouse cytomegalovirus (MCMV), mouse rotavirus (EDIM), Kilham rat virus (KRV), Toolan's H-1 virus, Sendai virus (SeV, also know as murine parainfluenza virus type 1 or hemagglutinating virus of Japan (HVJ)), Parker's rat coronavirus (RCV or SDA), pseudorabies virus (PRV), reoviruses, Cache Valley virus, bovine viral diarrhoea virus, bovine parainfluenza virus type 3, bovine respiratory syncytial virus, bovine adenoviruses, bovine parvoviruses, bovine herpesvirus 1 (infectious bovine rhinotracheitis virus), other bovine herpesviruses, bovine reovirus, rabies virus, bluetongue viruses, bovine polyoma virus, bovine circovirus, and orthopoxviruses other than vaccinia, pseudocowpox virus (a widespread parapoxvirus that can infect humans), papillomavirus, herpesviruses, or leporipoxviruses.

[0033] Other embodiments target human-origin adventitious agents including HIV-1 and HIV-2; human T cell lymphotropic virus type I (HTLV-I) and HTLV-II; human hepatitis A, B, and C viruses; human cytomegalovirus; Epstein Barr virus (EBV or HHV-4); human herpesviruses 6, 7, and 8; human parvovirus B19; reoviruses; polyoma (JC/BK) viruses; SV40 virus; human coronaviruses; human papillomaviruses; influenza A, B, and C viruses; human enteroviruses; human parainfluenza viruses; and human respiratory syncytial virus.

[0034] Yet other embodiments of the present invention target host cell surface receptors or intracellular proteins to which endogenous, latent, or adventitious virus bind or which are required for viral replication. For example, in a particular embodiment, the target gene is a CHO cell MVM receptor gene, such as a gene associated with cellular sialic acid production.

[0035] In some embodiments, the immunogenic agent produced via the compositions and methods of the present invention is a viral immunogenic agent, from any type of animal virus, such as those of arenaviridae, orthomyxoviridae, paramyxoviridae, Filoviridae, rabdoviridae, birnaviridae, reoviridae, picornaviridae, coronaviridae, flaviviridae, togaviridae, adenoviridae, herpesviridae, papovaviridae, parvoviridae, circoviridae, poxyiridae, and retroviridae. In particular embodiments, the virus is poliovirus, hepatitis A virus (HAV), tick-borne encephalitis virus (TBEV), yellow fever virus, rubella virus, hepatitis C virus (HCV), hepatitis B virus (HBV), variola virus, mumps virus, measles virus, rubella virus, respiratory syncytial virus, vesicular stomatits virus (VSV), rabies virus, ebola virus, influenza virus, lassa virus, junin virus, reovirus, adenovirus type 1 to type 47, herpes simplex viruses (HSV 1, HSV 2), cytomegalo virus (CMV), varicella zoster vim (VZV), Epstein-Barr virus (EBV), human immunodeficiency virus (HIV), West Nile virus, rotavirus, or vaccinia virus.

[0036] In particular embodiments, the immunogenic agent is influenza, and can include attenuated influenza viruses, cold-adapted influenza viruses, temperature-sensitive influenza viruses, reassortant influenza viruses, high yield donor influenza viruses, wild-type influenza viruses isolated from throat swabs of infected mammals, and viruses that have been passaged in embryonated chicken eggs, or cell culture adapted strains of influenza viruses.

[0037] Thus, in some embodiments of the present invention, the immunogenic agent is a virus, including naturally occurring strains, variants, or mutants; mutagenized viruses (e.g., generated by exposure to mutagens, repeated passages and/or passage in non-permissive hosts); reassortants (in the case of segmented viral genomes); and/or genetically engineered viruses (e.g., using the “reverse genetics” techniques) having the desired phenotype; and other virus-based (viral) products. The viral immunogenic agent of the invention can be attenuated virus; i.e., virus that is infectious and can replicate in vivo, but generates low titers resulting in subclinical levels of infection that are non-pathogenic.

[0038] Additionally, in some embodiments the desired viral immunogenic agent is viral progeny that has been attenuated by targeting viral proteins associated with virulence (e.g., influenza NP, PA, PB1, PB2, M, and NS genes). The glycosylation pattern of biologic product of interest, such as the hemagglutinin (HA) and neuraminidase (NA) influenza proteins, can be attenuated to improve antigenicity or host adaptation. In essence, any aspect of the quality and attributes as well efficiency of bioprocessing can be modified by this approach.

[0039] Alternative embodiments of the present invention provide for production of an immunogenic bacterial agent, i.e., a bacterial immunogen, in a eukaryotic host cell. These bacteria include Shigella flexneri, Listeria monocytogenes, Rickettsiae tsutsugamushi, Rickettsiae rickettsiae, Mycobacterium leprae, Mycobacterium tuberculosis, Legionella pneumophila, Chlamydia ssp.

[0040] Additional embodiments of the present invention provide for production of an immunogenic protozoal agent, i.e., a protozoal immunogen, in a eukaryotic host cell. These protozoa include Plasmodium falciparum, Tripanosoma cruzi, and Leishmania donovani.

[0041] The method of the invention also can include the steps of monitoring the growth, infection and activation levels of the host cell culture, and as well as for varying the conditions of the host cell culture to maximize the growth, infection and activation levels of the host cells and desired agent, and for harvesting the immunogenic agent (e.g., virus) from the culture, preparing a vaccine with the harvested agent, and for the treatment and/or the prevention of infection or disease by administering to a subject a vaccine obtained by the method.

[0042] In some embodiments, the host cell is administered a plurality of different oligonuceotides (e.g., RNA effector molecules) to modulate expression of multiple target genes. The RNA effector molecules can be administered at different times or simultaneously, at the same frequency or different frequencies, at the same concentration or at different concentrations.

[0043] In further embodiments, the method further comprises administering to the host cell a second agent. The second agent can be a growth factor; an apoptosis inhibitor; a kinase inhibitor; a phosphatase inhibitor; a protease inhibitor; an inhibitor of pathogens (e.g., where a virus is the biological product, an agent that inhibits growth and/or propagation of other viruses or fungal or bacterial pathogens); or a histone demethylating agent. Where the virus being propagated is influenza, the second agent can be a protease that cleaves influenza hemagglutinin, such as pronase, thermolysin, subtilisin A, or a recombinant protease.

[0044] More specifically, in some embodiments the second target gene is a gene associated with host cell immune response, and the target gene selected from the group consisting of TLR3, TLR7, TLR21, RIG-1, LPGP2, RIG 1-like receptors, TRIM25, IFN-α, IFN-β, IFN-γ MAVS/VISA/IPS 1/Gardif, IFNAR1, IFNR2, STAT-1, STAT-2, STAT-3, STAT-4, JAK-1, JAK-2, JAK-3, IRF1, IRF2, IRF3, IRF4, IRF5, IRF6 IRF7, IRF8, IRF 9, IRF10, 2′,5′ oligoadenylate synthetase, RNaseL, dsRNA-dPKR, Mx, IFITM1, IFITM2, IFITM3, Proinflammatory cytokines, MYD88, TRIF, and a regulatory region of any of the foregoing.

[0045] In other specific embodiments, the second target gene is a gene associated with host cell viability, growth or cell cycle, and the target gene is selected from the group consisting of Bax, Bak, LDHA, LDHB, BIK, BAD, BIM, HRK, BCLG, HR, NOXA, PUMA, BOK, BOO, BCLB, CASP2, CASP3, CASP6, CASP7, CASP8, CASP9, CASP10, BCL2, p53, APAF1, HSP70, TRAIL, BCL2L1, BCL2L13, BCL2L14, FASLG, DPF2, AIFM2, AIFM3, STK17A, APITD1, SIVA1, FAS, TGFβ2, TGFBR1, LOC378902, or BCL2A1, PUSL1, TPST1, WDR33, Nod2, MCT4, ACRC, AMELY, ATCAY, ANP32B, DEFA3, DHRS10, DOCK4, FAM106A, FKBP1B, IRF3, KBTBD8, KIAA0753, LPGAT1, MSMB, NFS1, NPIP, NPM3, SCGB2A1, SERPINB7, SLC16A4, SPTBN4, TMEM146, CDKN1B, CDKN2A, FOXO1, PTEN, FN1, a miRNA antagonist, host sialidase, NEU2 sialidase 2, NEU3 sialidase 3, Dicer, ISRE, and a regulatory region of any of the foregoing.

[0046] In some embodiments, the invention provides for a host cell that contains at least one RNA effector molecule provided herein. The host cell can be derived from an insect, amphibian, fish, reptile, bird, mammal, or human, or can be a hybridoma cell. For example, the cell can be a human Namalwa Burkitt lymphoma cell (BLc1-kar-Namalwa), baby hamster kidney fibroblast (BHK), CHO cell, Murine myeloma cell (NS0, SP2/0), hybridoma cell, human embryonic kidney cell (293 HEK), human retina-derived cell (PER.C6® cells), insect cell line (Sf9, derived from pupal ovarian tissue of Spodoptera frugiperda; or Hi-5, derived from Trichoplusia ni egg cell homogenates), Madin-Darby canine kidneycell (MDCK), primary mouse brain cells or tissue, primary calf lymph cells or tissue, primary monkey kidney cells, embryonated hens' egg, primary chicken embryo fibroblast (CEF), Rhesus fetal lung cell (FRhL-2), Human fetal lung cell (WI-38, MRC-5), African green monkey kidney epithelial cell (Vero, CV-1), Rhesus monkey kidney cell (LLC-MK2), or yeast cell.

[0047] In additional embodiments, the target gene encodes a protein that affects a physiological process of the host cell. In various embodiments, the physiological process is apoptosis, cell cycle progression, carbon metabolism or transport, lactate formation, or RNAi uptake and/or efficacy.

[0048] In other embodiments, the invention provides a composition for enhancing production of an immunogenic agent in a host cell by modulating the expression of a target gene in the cell. The composition typically includes one or more oligonuceotides, such as RNA effector molecules described herein, and a suitable carrier or delivery vehicle.

[0049] In other embodiments, a composition containing two or more different RNA effector molecules directed against different target genes for the same protein is used to enhance production of an immunogenic agent in a host cell by modulating expression of a the same protein gene in the host cell, wherein the first and second target gene can be associated with expression of the protein but, for example, the first target is a coding region and the second target is an untranslated region (UTR) of the protein gene.

[0050] Still another embodiment of the invention encompasses kits for enhancing production of an immunogenic agent in a host cell. In one aspect, a kit comprises a RNA effector molecule that modulates expression of a target gene to inhibit expression of a latent, adventitious, or endogenous virus and thus affect production of the desired immunogenic agent. In another embodiment, a kit comprises a host cell that expresses a RNA effector molecule that modulates expression of latent, adventitious, or endogenous virus that affects production of the desired immunogenic agent. Such kits can also comprise instructions for carrying out methods provided herein. The kits can also include at leat one reagent that facilitates RNA effector molecule-uptake, comprising a charged lipid, an emulsion, a liposome, a cationic or non-cationic lipid, an anionic lipid, a transfection reagent or a penetration enhancer. In a particular embodiment, the reagent that facilitates RNA effector molecule-uptake comprises a charged lipid.

[0051] Other embodiments of the present invention provide for methods of removing latent or adventitious virus from contaminated cells comprising: identifying a target gene that is required for viral replication or infectivity; designing at least one RNA effector molecule against that gene target; contacting the contaminated cells with the RNA effector molecule; screening the cells to identify those no longer expressing viral nucleic acids, proteins, or infective particles; and expanding those identified virus-free cells.

[0052] A particular embodiment of the present invention provides a method for producing an influenza virus and/or influenza viral proteins for use in a vaccine, the method comprising: providing a host cell with nucleic acid encoding an influenza virus or infecting the host cell with influenza virus; providing the host cell with at least one RNA effector molecule that inhibits latent, adventitious, or endogenous virus; culturing the host cell in a suitable medium and allowing for propagation of the influenza virus or production of the viral proteins; and harvesting the influenza virus and/or influenza viral proteins from the suitable medium and/or the host cell.

[0053] Other embodiments provides for a process for producing hemagglutinin proteins and/or neuraminidase proteins of an influenza virus, the process comprising: providing a host cell with nucleic acid encoding an influenza virus or infecting the cell with influenza virus; providing the host cell with at least one RNA effector molecule that targets latent, adventitious, or endogenous virus; culturing the hsot cell in a suitable medium and allowing for propagation of the influenza virus; harvesting the propagated influenza virus; disrupting the influenza virus; and isolating hemagglutinin proteins and/or neuraminidase proteins from the disrupted influenza virus.

[0054] An advantage of the present invention is the ability to substantially increase the yield of host cells and immunogenic agent-based products, i.e., vaccines, and thereby reduce production costs. Improved manufacturing logistics have the follow-on effect of enhancing quality control, as well as expand the vaccine supply, for example in epidemic and pandemic outbreaks of diseases such as influenza.

### DETAILED DESCRIPTION

[0055] It should be understood that this invention is not limited to the particular methodology, protocols, and reagents, etc., described herein and as such can vary. The terminology used herein is for the purpose of describing particular embodiments only, and is not intended to limit the scope of the present invention, which is defined solely by the claims.

[0056] As used herein and in the claims, the singular forms include the plural reference and vice versa unless the context clearly indicates otherwise. Other than in the operating examples, or where otherwise indicated, all numbers expressing quantities of ingredients or reaction conditions used herein should be understood as modified in all instances by the term “about.”

[0057] All patents, oligonucleotide sequences identified by gene identification numbers, and other publications identified herein are expressly incorporated by reference for the purpose of describing and disclosing, for example, the methodologies described in such publications that might be used in connection with the present invention. These publications are provided solely for their disclosure prior to the filing date of the present application. Nothing in this regard should be construed as an admission that the inventors are not entitled to antedate such disclosure by virtue of prior invention or for any other reason. All statements as to the date or representation as to the contents of these documents is based on the information available to the applicants and does not constitute any admission as to the correctness of the dates or contents of these documents.

[0058] Unless defined otherwise, all technical and scientific terms used herein have the same meaning as those commonly understood to one of ordinary skill in the art to which this invention pertains. All gene identification numbers provided herein (GeneID) are those of the National Center for Biotechnology Information “Entrez Gene” web site unless identified otherwise. Although any known methods, devices, and materials can be used in the practice or testing of the invention, the methods, devices, and materials in this regard are described herein.

[0059] The present invention provides for the production of biological products devoid of contaminating viruses; biological products such as immunogenic agents, for example, viruses, viral antigens, bacteria, or protozoans, or recombinant proteins derived from a virus, viral expression vector, bacterium, or protozoan. Embodiments of the invention provide for biological products, cells (e.g., cell banks or production lines), and virus stock that are devoid of unwanted viral contaminants (e.g., virus particles, proteins, nucleic acids).

[0060] A current approach for producing viral-based vaccines involves the use of attenuated live virus vaccines, which are capable of replication but are not pathogenic, and, therefore, provide lasting immunity and afford greater protection against disease. The conventional methods for producing attenuated viruses involve the chance isolation of host range mutants, many of which are temperature sensitive, e.g., the virus is passaged through unnatural hosts, and progeny viruses which are immunogenic, yet not pathogenic, are selected. Efficient vaccine production requires the growth of large quantities of virus produced in high yields from a host system. Different types of virus require different growth conditions in order to obtain acceptable yields. The host in which the virus is grown is therefore of great significance. As a function of the virus type, a virus can be grown in embryonated eggs, primary tissue culture cells, or in established cell lines.

[0061] For example, since the introduction in the 1940s of an inactivated influenza vaccine containing inactivated virus material from infected incubated eggs, the risk and course of the infection as well as the mortality rates in the elderly have dropped. A particular advantage of inactivated influenza virus or influenza viral antigens obtained cell culture is the absence of egg-specific proteins that might trigger an allergic reaction against egg proteins. Therefore, the use according to the invention is especially suitable for the prophylaxis of influenza virus infections, particularly in populations that constitute higher-risk groups, such as asthmatics, those with allergies, and also people with suppressed immune systems and the elderly.

[0062] The cultivation conditions under which a virus strain is grown in cell culture also are of great significance with respect to achieving an acceptably high yield of the strain. In order to maximize the yield of a desired virus strain, both the host system and the cultivation conditions must be adapted specifically to provide an environment that is advantageous for the production of a desired virus strain. Many viruses are restricted to very specific host systems, some of which are very inefficient with regard to virus yields. Some of the mammalian cells which are used as viral host systems produce virus at high yields, but the tumorigenic nature of such cells invokes regulatory constraints against their use for vaccine production.

[0063] The problems arising from the use of serum in cell culture and/or protein additives derived from an animal or human source added to the culture medium, e.g., the varying quality and composition of different batches and the risk of contamination with mycoplasma, viruses or BSE-agent, are well-known. In general, serum or serum-derived substances like albumin, transferrin or insulin can contain unwanted agents that can contaminate the culture and the biological products produced therefrom. Furthermore, human serum derived additives have to be tested for all known viruses, like hepatitis or HIV, which can be transmitted by serum. Bovine serum and products derived therefrom, for example trypsin, bear the risk of bovine spongiform encephalitis-contamination. In addition, all serum-derived products can be contaminated by still unknown agents. Therefore, cells and culture conditions that do not require serum or other serum derived compounds are being pursued.

[0064] For example, the production of smallpox vaccine, modified vaccinia virus Ankara (MVA) is amplified in cell cultures of primary or secondary chicken embryo fibroblasts (CEF). The CEF are obtained from embryos of chicken eggs that have been incubated for 10 to 12 days, from which the cells are then dissociated and purified. These primary CEF cells can either be used directly or after one further cell passage as secondary CEF cells. Subsequently, the primary or secondary CEF cells are infected with the MVA. For the amplification of MVA the infected cells are incubated for 2 to 3 days at 37° C. See, e.g., Meyer et al., 72 J. Gen. Virol. 1031-38 (1991); Sutter et al., 12 Vaccine 1032-40 (1994). Many pox viruses replicate efficiently in CEF incubated at temperatures below 37° C., such as 30° C. See U.S. Pat. No. 6,924,137.

[0065] The use of established mammalian cell lines, such as Madin-Darby canine kidney (MDCK) line, has been successful in replicating some viral strains. Nevertheless, a number of virus strains will not replicate in the MDCK line. In addition, fears over possible adverse effects associated with employing cells with a tumorigenic potential for human vaccine production have precluded the use of MDCK, a highly transformed cell line, in this context.

[0066] Other attempts at developing alternative vaccine production methods have been undertaken. U.S. Pat. No. 4,783,411 discusses a method for preparing influenza vaccines in goldfish cell cultures. The virus particles for infecting the goldfish cell cultures, after their establishment, were obtained from chicken embryo cultures or from infected CD-I strain mice. The virus is passaged at least twice in the goldfish cell cultures, resulting in an attenuated influenza virus which can be used as a live vaccine. Additionally, African green monkey kidney epithelial cells (Vero) and chicken embryo cells (CEC) have been adapted to grow and produce influenzae virus and recombinant influenzae proteins in serum-free, protein-free media. See WO 96/015231.

[0067] Although the use of protein and serum free media limits the risk from adventitious virus contamination, it does not address the continued risk posed by latent viruses or endogenous retroviruses that exist in cell banks. The activation of an endogenous, infectious retrovirus in a cell substrate that is used for the production of biologics is an important safety concern, especially in the case of live, viral vaccines, where there are minimal purification and inactivation steps in order to preserve high vaccine potency.

[0068] Retroviruses replicate by reverse transcription, mediated by an RNA-dependent DNA polymerase (reverse transcriptase), encoded by the viral pol gene. Retroviruses also carry at least two additional genes: the gag gene encodes the proteins of the viral skeleton, matrix, nucleocapsid, and capsid; the env gene encodes the envelope glycoproteins. Additionally, retroviral transcription is regulated by promoter regions or “enhancers” situated in highly repeated regions (LTRs) which are present at both ends of the retroviral genome.

[0069] During the infection of a cell, reverse transcriptase makes a DNA copy of the RNA genome; this copy can then integrate into the host cell genome. Retroviruses can infect germ cells or embryos at an early stage and be transmitted by vertical Mendelian transmission. These endogenous retroviruses (ERVs) can degenerate during generations of the host organism and lose their initial properties. Some ERVs conserve all or part of their properties or of the properties of their constituent motifs, or acquire novel functional properties having an advantage for the host organism. These retroviral sequences can also undergo, over the generations, discrete modifications which will be able to trigger some of their potential and generate or promote pathological processes.

[0070] Human endogenous retroviral sequences (HERVs) represent a substantial part of the human genome. These retroviral regions exist in several forms: complete endogenous retroviral structures combining gag, pol and env motifs, flanked by repeat nucleic sequences which exhibit a significant analogy with the LTR-gag-pol-env-LTR structure of infectious retroviruses; truncated retroviral sequences, for example the retrotransposons lack their env domain; and the retroposons that lack the env and LTR regions. ERVs capable of shedding virus particles are often called type C ERVs.

[0071] Important ERVs include human teratocarcinoma retrovirus (HTDV), or HERV-K, an endogenous retrovirus known to produce viral particles from endogenous provirus. Lower et al., 68 J. Gen. Virol. 2807-15 (1987); Mold et al., 4 J. Biomed. Sci. 78082 (2005). HERV-R is another important ERV, because it has been found to be expressed in many tissues, including the adrenal cortex and various adrenal tumors such as cortical adenomas and pheochromocytomas. Katsumata et al., 66 Pathobiology 209-15 (1998). Murine leukemia virus (MLV) is another important ERV, that produces infective virus particles in rodent-derived cell culture upon induction. Khan & Sears, 106 Devel. Biol. 387-92 (2001). Indeed, cell culture changes that significantly alter the metabolic state of the cells and/or rates of protein expression (e.g., pH, temperature shifts, sodium butyrate addition) measurably increased the rate of endogenous retroviral synthesis in CHO cells. Brorson et al., 80 Biotech. Bioengin. 257-67 (2002).

[0072] An on-line database, called HERVd—Human Endogenous Retrovirus Database (NAR Molecular Biology Database Collection entry number 0495), has been compiled from the human genome nucleotide sequences, obtained mostly in the various ongoing Human Genome Projects. This provides a relatively simple and fast environment for screening HERVs, and makes it possible to continuously improve classification and characterization of retroviral families. The HERVd database now contains retroviruses from more than 90% of the human genome. Additionally, ERV sequences can be obtained readily through the National Institutes of Health's on-line “Entrez Gene” site.

[0073] Further regarding ERVs, embodiments of the present invention target at least one gene or LTR of primate/human Class I Gamma ERVs pt01-Chr10r-17119458, pt01-Chr5-53871501, BaEV, GaLV, HERV-T, HERV-R (HERV-3, ERV3 env gene, GeneID:2086), HERV-E (ERVE1, GeneID:85314), HERV-ADP, HERV-I, MER4like, HERV-FRD (ERVFRD1, Env protein, GeneID:405754; Pan troglodytes Env protein, GeneID:471856; Rattus norvegicus Herv-frd Env polyprotein, GeneID:290348), HERV-W (ERVWE2, ERV-W, env(C7), member 2, Pan troglodytes, GeneID:100190905; HERVWE1, ERV-W, env(C7), member 1, GeneID:30816), HERV-H(HHLA1, HERV-H LTR-associating protein 1, GeneID:10086, Pan troglodytes GeneID:736282; Hhla1, mouse GeneID:654498; HHLA2, HERV-H LTR-associating protein 2, GeneID:11148; HHLA3, HERV-H LTR-associating protein 3, GeneID:11147; Xenopus hhla2, GeneID:734131), HERVH-RTVLH2, HERVH-RGH2, HERV-Hconsensus, HERV-Fc1; primate/human Epsilon endogenous retrovirus hg15-chr3-152465283; primate/human Intermediate (epsilon-like) HERVL66; primate/human Class III Spuma-like ERVs HSRV, HFV, HERV-S, HERV-L, HERVL40, HERVL74; primate/human Delta ERV HTLV-1, HTLV-2; primate/human Lenti ERV (lentivirus) HIV-1, HIV-2; primate/human Class II, Beta ERVs MPMV, MMTV, HML1, HML2, HML3, HML4, HML7, HML8, HML5, HML10, HML6, HML9, human teratocarcinoma-derived retrovirus (HTDV/HERV-K), or HERV-V (HERV-V1 Env1, GeneID:147664; HERV-V2, HSV2, GeneID:100271846).

[0074] Additional primate ERV genes that can be targeted by the methods of the present invention include LOC471586 (similar to ERV-BabFcenv provirus ancestral Env polyprotein, Pan troglodytes GeneID:471586), LOC470639 (similar to ERV-BabFcenv provirus ancestral Env polyprotein, Pan troglodytes GeneID:470639); LOC100138322 (similar to HERV-K_{—}7p22.1 provirus ancestral Pol protein, Bos taurus GeneID:10013822; LOC110138431 (similar to HERV-K_{—}1q22 provirus ancestral Pol protein, Bos taurus GeneID:100138431; LOC100137757 (similar to HERV-K_{—}6q14.1 provirus ancestral Gag-Pol polyprotein, Bos taurus GeneID:100137757); LOC100141085 (similar to HERV-K_{—}8p23.1 provirus ancestral Pol protein, Bos taurus GeneID:100141085); LOC100138106 (similar to HERV-F(c)1_Xq21.33 provirus ancestral Gag polyprotein, Bos taurus GeneID: LOC100138106); LOC100140731 (similar to HERV-W_{—}3q26.32 provirus ancestral Gag polyprotein Bos taurus, GeneID:100140731); LOC100139657 (similar to HERV-W_{—}3q26.32 provirus ancestral Gag polyprotein Bos taurus GeneID:100139657).

[0075] In other embodiments of the present invention, the ERV is rodent Class II, Beta ERV mouse mammary tumor (MMTV, GeneID:2828729; MMTVgp7, GeneID:1491863; MMTV env GeneID:1491862; MMTVgp1, GeneID:1724724; MMTVgp2, GeneID:1724723; MMTV pol GeneID:1491865; MMTV pro, GeneID:1491865; MMTV gag, GeneID:1491864); rodent Class I Gamma ERV MLV (Mlv1, mouse GeneID:108317); feline Class I Gamma ERV FLV; ungulate Class I Gamma ERV PERV; ungulate Delta ERV BLV; ungulate lentivirus Visna, EIAV; ungulate Class II, Beta ERV JSRV; avian Class III, Spuma-like ERVs gg01-chr7-7163462; gg01-chrU-52190725, gg01-Chr4-48130894; avian Alpha ERVs ALV (ALV pol GeneID:1491910; ALVp2, GeneID:1491909; ALVp10, GeneID:1491908; ALV env, GeneID:1491907; ALV transmembrane protein, tm, GeneID:1491906; ALV trans-acting factor, GeneID:1491911), gg01-chr1-15168845; avian Intermediate Beta-like ERVs gg01-chr4-77338201; gg01-ChrU-163504869, gg01-chr7-5733782; Reptilian Intermediate Beta-like ERV Python-molurus; Fish Epsilon ERV WDSV; fish Intermediate (epsilon-like) ERV SnRV; Amphibian Epsilon ERV Xen1; Insect Errantivirus ERV Gypsy; or Ty1 in Saccharomyces cerevisiae, yeast ORF161 (ERV-1-like protein, Ectocarpus siliculosus virus 1, GeneID:920716).

[0076] Further regarding ERVs, as noted herein the HERV-K ERVs are particularly relevant because they can be activated by a variety a stimuli. Hence, aspects of the present invention target genes of the HERV-K family, including HERV-K3, GeneID:2088; HERV-K2, GeneID:2087; HERV-K_{—}11q22.1 provirus ancestral Pol protein, GeneID:100133495; HERV-K7, GeneID:449619; HERV-K6, GeneID:64006; HERV-K(1), ERVK4, GeneID:60359; and HERV-K(II), ERVK5, GeneID:60358; LOC100133495 (HERV-K_{—}11q22.1 provirus ancestral Pol protein, GeneID:100133495).

[0077] As described herein, in particular aspects of the present invention the target gene is an ERV env gene, for example eERV family W, env(C7), member 1 (ERVWE1), GeneID:30816; hypothetical LOC147664 (HERV-V1 or EnvV1), GeneID:147664; HERV-FRD provirus ancestral Env polyprotein (ERVFRDE1), GeneID:405754 and GeneID:471856; ERV sequence K, 6 (ERVK6 or HERV-K108), GeneID:64006; ERV sequence 3 envelop protein (ERV3), GeneID:2086 and GeneID:100190893; ALV Env protein, GeneID:1491907, or the Env protein of HERV-K18.

[0078] Additionally, Bornaviruses are genus of non-segmented, negative-sense, non-retroviral RNA viruses that establish persistent infection in the cell nucleus. Elements homologous to the bornavirus nucleoprotein (N) gene exist in the genomes of several mammalian species, and produce mRNA that encodes endogenous Borna-like N (EBLN) elements. Horie et al., 463 Nature 84-87 (2010). Hence, in some embodiments of the invention, the target gene is a bornaviral gene.

[0079] In addition to targeting ERV genes and regulatory sequences, some embodiments of the present invention target ERV receptors. For example, human solute carrier family 1 (neutral amino acid transporter), member 5 (SLC1A5, GeneID:6510) is a receptor for Simian type D retrovirus and feline endogenous RD-114 virus. Solute carrier family 1 (glutamate/neutral amino acid transporter), member 4 (Slc1a4, GeneID:55963) and member 5 (Slc1a5, GeneID: 20514) are mouse versions of related proteins. Human solute carrier family 1 (glutamate/neutral amino acid transporter), member 4 (SLC1A4, GeneID:6509), is used as receptor by HERV-W Env glycoprotein. Thus, inhibition of cellular viral receptors can decrease receptor interference, latent, endogenous or adventitious viral infection, and thus increase the production of immunogenic agent in the cell.

[0080] Latent DNA viruses that can be targeted by the methods of the present invention include adenoviruses. For example, species of C serotype adenovirus can establish latent infection in human tissues. See Garnett et al., 83 J. Virol. 2417-28 (2000). Avian adenovirus and adenovirus-associated virus (AAV) proteins have been produced by specific-pathogen-free chicks, indicating that avian AAV can exist as a latent infection in the germ line of chickens. Sadasiv et al., 33 Avian Dis. 125-33 (1989); see also Katano et al., 36 Biotechniq. 676-80 (2004). In some embodiments of the invention, the target gene is a latent DNA virus. For example, the target gene can be the latent membrane protein (LMP)-2A from HHV-4 (EBV), GeneID:3783751, which protein also transactivates the Env protein of HERV-K18.

[0081] Circoviridae are also DNA viruses that exhibit a latent phase. Porcine circoviridae type 1 (PCV1) was shown to contaminate Vero cell banks from which rotavirus vaccine was made, leading to an FDA hold on administration of the vaccine. Associated Press, Mar. 23, 2010. The rep gene of PCV1 is indispensable for replication of viral DNA. Mankertz & Hillenbrand, 279 Virol. 429-38 (2001). Hence, a particular embodiment of the present invention provides for a RNA effector molecule that inhibits a PCV1 rep gene. Example dsRNA molecules are provided herein.

[0082] Other embodiments of the present invention target the genes of adventitious animal viruses, including vesivirus, porcine circovirus, lymphocytic choriomeningitis virus, porcine parvovirus, adenoassociated viruses, reoviruses, rabies virus, papillomavirus, herpesviruses, leporipoxviruses, and leukosis virus (ALV), hantaan virus, Marburg virus, SV40, SV20, Semliki Forest virus (SFV), simian virus 5 (sv5), feline sarcoma virus, porcine parvovirus, adenoassociated viruses (AAV), mouse hepatitis virus (MHV), Moloney murine leukemia virus (MoMLV or MMLV, gag protein GeneID:1491870), murine leukemia virus (MuLV), pneumonia virus of mice (PVM), Theiler's encephalomyelitis virus (THEMV), murine minute virus (MMV or MVM, GeneID:2828495, vp1, GeneID:148592; vp, GeneID:1489591; nsl, GeneID:1489590), mouse adenovirus (MAV), mouse cytomegalovirus (MCMV), mouse rotavirus (EDIM), Kilham rat virus (KRV), Toolan's H-1 virus, Sendai virus (SeV, also known as murine parainfluenza virus type 1 or hemagglutinating virus of Japan (HVJ)), rat coronavirus (RCV or sialodacryoadenitis virus (SDA)), pseudorabies virus (PRV), Cache Valley virus, bovine diarrhea virus, bovine parainfluenza virus type 3, bovine respiratory syncytial virus, bovine adenoviruses, bovine parvoviruses, bovine herpesvirus 1 (infectious bovine rhinotracheitis virus), other bovine herpesviruses, bovine reovirus, other bovine herpesviruses, bovine reovirus, bluetongue viruses, bovine polyoma virus, bovine circovirus, and orthopoxviruses other than vaccinia, pseudocowpox virus (a widespread parapoxvirus that can infect humans), papillomavirus, herpesviruses, leporipoxviruses, or exogenous retroviruses.

[0083] Other embodiments target human-origin adventitious agents including HIV-1 and HIV-2; human T cell lymphotropic virus type I (HTLV-I) and HTLV-II; human hepatitis A, B, and C viruses; human cytomegalovirus (CMV); Epstein Barr virus (EBV); human herpesviruses 6, 7, and 8; human parvovirus B19; reoviruses; polyoma (JC/BK) viruses; 5V40 virus; human coronaviruses; human papillomaviruses; influenza A, B, and C viruses; various human enteroviruses; human parainfluenza viruses; and human respiratory syncytial virus.

[0084] Parvoviridae are single-stranded DNA viruses with genomes of about 4 to 5 kilobases. This family includes: Dependovirus such as human helper-dependent adeno-associated virus (AAV) serotypes 1 to 8, autonomous avian parvoviruse, and adeno associated viruses (AAV 1-8); Erythrovirus such as bovine, chipmunk, and autonomous primate parvoviruses, including human parvoviruses B19 (the cause of Fifth disease) and V9; and Parvovirus that includes parvoviruses of other animals and rodents, carnivores, and pigs, including MVM. These parvoviruses can infect several cell types and have been described in clinical samples. AAVs, in particular, have been implicated in decreased replication, propagation, and growth of other virus.

[0085] MVM gains cell entry by deploying a lipolytic enzyme, phospholipase A2 (PLA2), that is expressed at the N-terminus of virion protein 1 (VP1, also called MMVgp3), the MVM minor coat protein, GeneID:1489592. Farr et al., 102 P.N.A.S. 17148-53 (2005). Other MVM targets can be chosen from MVM VP (also called MMVgp2), GeneID:1489591; and MVM non-structural, initiator protein (NS1, also called MMVgp1), GeneID:1489590.

[0086] Polyomaviruses are double-stranded DNA viruses that can infect, for example, humans, primates, rodents, rabbits, and birds. Polyomaviruses (PyV) include SV40, JC and BK viruses, Murine pneumonotropic virus, hamster PyV, murine PyV virus, and Lymphotropic papovavirus (LPV, the African green monkey papovavirus). The sequences for these viruses are available via GenBank. See also U.S. Patent Pub. No. 2009/0220937. Because of their tumorigenic and oncogenic potential, it is important to eliminate these viruses in cell substrates used for vaccine production.

[0087] Papillomaviridae contains more that 150 known species representing varying host-specificity and sequence homology. They have been identified in mammals (humans, simians, bovines, canines, ovines) and in birds. Majority of the human Papillomaviruses (HPVs), including all HPV types traditionally called genital and mucosal HPVs belong to supergroup A. Within supergroup A, there are 11 groups; the most medically important of these are the human Papillomaviruses HPV 16, HPV 18, HPV 31, HPV 45, HPV 11, HPV 6 and HPV 2. Each of these has been reported as “high risk” viruses in the medical literature.

[0088] Exogenous retroviruses are known to cause various malignant and non-malignant diseases in animals over a wide range of species. These viruses infect most known animals and rodents. Examples include Deltaretroidvirus (HTLV-1, -2, -3, and -4, STLV-1, -2, and -3), Gammaretrovirus (MLV, PERV), Alpharetrovirus (Avian leucosis virus and Avian endogenous virus), and HIV 1 and 2.

[0089] Other viral families which are potential adventitious contaminants for which embodiments of the present invention are directed include: Bunyaviridae (LCMV, hantavirus), Herpesviridae (Human herpesviruses 1 through 8, Bovine herpesvirus, Canine herpesvirus and Simian cytomegalovirus), Hepadnaviridae (Hepatitis B virus), Hepeviridae (Hepatitis E virus), Deltavirus (Hepatitis delta virus), Adenoviridae (Human adenoviruses A-F and murine adenovirus), Coronaviridae, Flaviviridae (Bovine viral diarrhea virus, TBE, Yellow fever virus, Dengue viruses 1-4, WNV and hepatitis C virus), Orthomyxoviridae (influenza), Paramyxoviridae (parainfluenza, mumps, measles, RSV, Pneumonia virus of mice, Sendai virus, and Simian parainfluenza virus 5), Togaviridae (Western equine encephalomyelitis virus, rubella), Picornaviridae (Poliovirus types 1-13, coxsackie B, echovirus, rhinovirus, Human hepatitis A, Human coxsackievirus, Human cardiovirus, Human rhinovirus and Bovine rhinovirus), Reoviridae (Mouse rotavirus, reovirus type 3 and Colorado tick fever virus), and Rhabdoviridae (vesicular stomatitis virus).

[0090] For example, mouse or hamster cell banks can be infected with viruses known to be pathogenic to human. Mouse cell banks can carry lymphocytic choriomeningitis virus (LCM), sendai virus, hantaan virus, and/or lactic dehydrogenase virus. Hamster cell banks can carry LCM, sendai virus, and/or reovirus type 3. Indeed, commercially available monoclonal antibodies produced from transgenic mouse-derived cells are tested for virus including LCM, Ectromelia (MEV), mouse encephalomyelitis virus (GDVII), Hantaan, MVM, mouse adenovirus (MAV), mouse hepatitis (MHV), pneumonia virus of mice (PVM), Polyoma, Reovirus type 3 (REO-3), Sendai (SeV), virus of epizootic diarrhea of infant mice (EDIM), mouse cytomegalovirus (MCMV), papovavirus K, and LDVH viruses; Thymic Agent virus; bovine virus diarrhea (BVD), infectious bovine rhinotracheitis (IBR), respiratory parainfluenz-3 (PI-3), papillomavirus (BPV) and adenovirus-3 (BAV-3) viruses; and caprine (goat) adenovirus (CAV), herpesvirus (CHV), and arthritis encephalitis virus (CAEV) viruses. See Geigert, CHALLENGE OF CMC REGULATORY COMPLIANCE FOR BIOPHARMACEUTICALS, 109-11 (Springer, New York, N.Y., 2004); BLA reference No. 98-9912, Centocor, Infliximab Detailed Product Review (1997); BioProcessing J. (Fall, 2009).

[0091] As used herein an “adventitious virus” or “adventitious viral agent” refers to a virus contaminant present within a biological product, including, for example, vaccines, cell lines and other cell-derived products. Regarding vaccine products, for example, exogenous, adventitious ALV was found in commercial Marek's Disease vaccines propagated in CEF or DEF cell cultures by different manufacturers. Moreover, some of these vaccines were also contaminated with endogenous ALV. Fadly et al., 50 Avian Diseases 380-85 (2006); Zavala & Cheng, 50 Avian Diseases 209-15 (2006).

[0092] A conventional substrate for isolating and growing influenza viruses for vaccine purposes is the embryonated chicken egg. Influenza viruses are typically grown during 2 to 4 days at 37° C. in 10 to 11 day-old eggs. Although most of the human primary isolates of influenza A and B viruses grow better in the amniotic sac of the embryos, after two to three passages the viruses become adapted to grow in the cells of the allantoic cavity, which is accessible from the outside of the egg. Murphy & Webster, Orthomyxoviruses 1397-445, in FIELDS VIROLOGY (Lippincott-Raven pub., PA, 1996). Recombinant DNA technology and genetic engineering techniques, in theory, can afford a superior approach to producing an attenuated virus because specific mutations are deliberately engineered into the viral genome. The genetic alterations required for attenuation of viruses are not always predictable, however. In general, the attempts to use recombinant DNA technology to engineer viral vaccines have been directed to the production of subunit vaccines which contain only the protein subunits of the pathogen involved in the immune response, expressed in recombinant viral vectors such as vaccinia virus or baculovirus. More recently, recombinant DNA techniques have been utilized to produce herpes virus deletion mutants or polioviruses that mimic attenuated viruses found in nature or known host range mutants.

[0093] The yield of attenuated live influenza viruses produced in a host cell can be adversely affected by the immune response of the host cell, e.g., the interferon response of the host cell in which the virus is replicated. Additionally, the infected host cell(s) can become apoptotic before viral yield is maximized. Thus, although these attenuated viruses are immunogenic and non-pathogenic, they are often difficult to propagate in conventional cell substrates for the purposes of making vaccines. Hence, some embodiments of the present invention provide for compositions and methods using oligonucleotides (e.g., RNA effector molecules) to modulate the expression of adverse host cell responses and therefore increase viral yield. For example, some embodiments of the present invention relate to contacting an RNAi-based product siRNA into the cell prior to, during or after the viral or vector administration, to inhibit cellular and anti-viral processes that compromise the yield and quality of the viral/immunogenic product harvest.

[0094] As used herein, the term “RNA effector molecule” refers to an oligonucleotide agent capable of modulating the expression of a target gene, as defined herein, within a host cell, or a oligonucleotide agent capable of forming such an oligonucleotide, optionally, within a host cell. The RNA effector molecules described herein generally have a first strand and a second strand, one of which is substantially complementary to at least a portion of the target gene and modulate expression of target genes by one or more of a variety of mechanisms, including but not limited to, Argonaute-mediated post-transcriptional cleavage of target gene mRNA transcripts (sometimes referred to in the art as RNAi) and/or other pre-transcriptional and pre-translational mechanisms.

[0095] As used herein, the term “contacting” with respect to contacting cells refers to placing the cells in the presence of at least one RNA effector molecule. As used herein, the phrase “in the presence of at least one RNA effector molecule” encompasses exposure of the cell to a RNA effector molecule experessed within the cell, e.g., shRNA, or exposure by exogenous addition of the RNA effector molecule to the cell, e.g., delivery of the RNA effector molecule to the cell, optionally using an agent that facilitates uptake into the cell. In one embodiment, a cell is contacted by addition of the RNA effector, and optionally an agent that facilitates uptake of the RNA effector, to the cells growth or culture medium. A portion of a RNA effector molecule is substantially complementary to at least a portion of the target gene RNA (e.g. target (contaminating) virus), such as the coding region, the promoter region, the 3′ untranslated region (3′-UTR), or a long terminal repeat (LTR) of the target gene RNA. RNA effector molecules disclosed herein include a RNA strand (the antisense strand) having a region which is 30 nucleotides or less in length, e.g., 10 to 200 nucleotides in length, or 19 to 24 nucleotides in length, which region is substantially complementary to at least a portion of a target gene which encodes a protein that affects one or more aspects of the production of a biological product, such as the yield, purity, homogeneity, biological activity, or stability of the biological product. A RNA effector molecule interacts with RNA transcripts of a target gene and mediates its selective degradation or otherwise prevents its translation. In various embodiments of the present invention, the RNA effector molecule is at least one gapmer, or siRNA, miRNA, dsRNA, saRNA, shRNA, piRNA, tkRNAi, eiRNA, pdRNA, antagomir, or ribozyme.

[0096] In the context of this invention, the term “oligonucleotide” refers to a polymer or oligomer of nucleotide or nucleoside monomers comprising naturally occurring bases sugars and intersugar (backbone) linkages. The term “oligonucleotide” also includes polymers or oligomers comprising non-naturally occurring monomers, or portions thereof, which function similarly. Such modified or substituted oligonucleotides are often preferred over native forms because of properties such as, for example, enhanced cellular uptake, increased stability in the presence of nucleases, and the like.

[0097] Double-stranded and single-stranded oligonucleotides that are effective in inducing RNA interference are also referred to as siRNA, RNAi agent, or iRNA agent, herein. These RNA interference inducing oligonucleotides associate with a cytoplasmic multi-protein complex known as RNAi-induced silencing complex (RISC). Without being bound by theory, RNA interference leads to Argonaute-mediated post-transcriptional cleavage of target gene mRNA transcripts. In many embodiments, single-stranded and double-stranded RNAi agents are sufficiently long that they can be cleaved by an endogenous molecule, e.g. by Dicer, to produce smaller oligonucleotides that can enter the RISC machinery and participate in RISC mediated cleavage of a target sequence, e.g., a target mRNA.

[0098] As used herein, the term “region” or “portion,” when used in reference to an RNA effector molecule refers to a nucleic acid sequence of at least 3, at least 4, at least 5, at least 6, at least 7, at least 8, at least 9, at least 10 or more nucleotides up to and including the entire nucleic acid sequence of a strand of an RNA effector molecule. In some embodiments, the “region” or “portion” when used in reference to an RNA effecto molecule includes nucleic acid sequence one nucleotide shorter than the entire nucleic acid sequence of a strand of an RNA effector molecule. Thus, the term “portion” refers to a region of an RNA effector molecule having a desired length to effect complementary binding to a region of a target gene RNA or a desired length of a duplex region. One of skill in the art can vary the length of the “portion” that is complementary to the target gene or arranged in a duplex, such that an RNA effector molecule having desired characteristics (e.g., inhibition of a target gene or stability) is produced. While not wishing to be bound by theory, RNA effector molecules provided herein can modulate expression of target genes by one or more of a variety of mechanisms, including but not limited to, Argonaute-mediated post-transcriptional cleavage of target gene mRNA transcripts (sometimes referred to in the art as RNAi) and/or other pre-transcriptional and/or pre-translational mechanisms.

[0099] As defined herein, “substantially devoid” refers to a cell population, medium, or stock (e.g., a viral seed stock) that contains significantly reduced (e.g., at least 90%, at least 95%, at least 99%, at least 99.9%, or at least 99.99% reduced) amount of detectable unwanted virus, viral particles or viral nucleic acid when compared with the initial cell population, medium or stock prior to the method described herein.

[0100] Methods for isolating cells that are substantially devoid of target virus (e.g. contaminating virus) are provided. In one embodiment, the method comprises a) contacting a population of cells, a portion of which comprises the target virus, with an RNA effector molecule that inhibits the growth or replication of the target virus; b) detecting the presence of the target virus in each cell; and, c) isolating at least one cell that is substantially devoid of the target virus. Embodiments of the invention allow for removal of contaminating virus from established cell line banks that have been historically used for the production of immunogenic agents, e.g. vaccines.

[0101] In one embodiment, 100% of the cells in the population comprise the target virus. In one embodiment, at least 60%, at least 70%, at least 80%, at least 90%, or at least 95% of the cells in the population comprise the target virus.

[0102] In one embodiment, the method further comprises repeating steps a)-c). Through repetition, any given cell population can successively have a reduced viral load, thus facilitating the isolation of a cell that is free of contaminating virus

[0103] Contaminating virus can be removed from any cells that host replication of the contaminating virus. Host cell can be derived from a yeast, insect, amphibian, fish, reptile, bird, mammal or human, or can be a hybridoma cell. For example, the host cell can be a human Namalwa Burkitt lymphoma cell (BLc1-kar-Namalwa), baby hamster kidney fibroblast (BHK), CHO cell, Murine myeloma cell (NS0, SP2/0), hybridoma cell, human embryonic kidney cell (293 HEK), human retina-derived cell (PER.C6® cells, U.S. Pat. No. 7,550,284), insect cell line (Sf9, derived from pupal ovarian tissue of Spodoptera frugiperda; or Hi-5, derived from Trichoplusia ni egg cell homogenates; see also U.S. Pat. No. 7,041,500), Madin-Darby canine kidney cell (MDCK), primary mouse brain cells or tissue, primary calf lymph cells or tissue, primary monkey kidney cells, embryonated hens' egg, primary chicken embryo fibroblast (CEF), Rhesus fetal lung cell (FRhL-2), Human fetal lung cell (WI-38, MRC-5), African green monkey kidney epithelial cell (Vero, CV 1), Rhesus monkey kidney cell (LLC-MK2), or yeast cell.

[0104] As used herein, the phrase “inhibits the growth or replication of the target virus” with respect to an RNA effector refers to a reduction (inhibition) of viral replication in cells in the presence of the RNA effector by at least 10%, at least 20%, at least 30%, at least 40%, at least 50%, at least 60%, at least 70%, at least 80%, at least 90%, at least 95%, at least 98%, at least 99%, or even 100% (i.e. absent, not measurable) relative to the viral replication in control cells, which are not contacted with the RNA effector. Methods for quantitating viral replication are well known to those in the art. In one embodiment, viral replication is monitored by determining the viral titer present in the cells or in culture medium or by measuring the amount of viral protein in the cells or in culture medium e.g. by Western hybridization. More sensitive assays of viral replication include quantitation of viral mRNA, (e.g. capsid protein (e.g. Cap) mRNA or replication associated protein mRNA, (e.g.Rep) present within a population of cells. Any viral mRNA can be quatitated by means practiced in the art, e.g. RT-PCR.

[0105] The dose of RNA effector to be used in the methods can be determined by determining the inhibitory concentration (e.g. IC50) with respect to viral replication, e.g. as measured by mRNA quantitation. In one embodiment, the concentration of RNA effector in cell culture media of a population of cells is at least greater than the IC50 of the RNA effector. In one embodiment, the concentration is sufficient to inhibit at least 90%, at least 95%, at least 98%, at least 99%, up to 100% of viral replication. The step of contacting a population of cells with an RNA effector molecule(s) can be repeated more than once (e.g., twice, 3×, 4×, 5×, 6×, 7×, 8×, 9×, 10×, 11×, 12×, 13×, 14×, 15×, 16×, 17×, 18×, 19×, 20×, 30×, 40×, 50×, 60×, 70×, 80×, 90×, 100× or more). In some embodiments, RNA effector is present at a concentration sufficient to inhibit viral replication through a period of time of at least one cell cycle division, at least two cell cycle division, at least three cell cycle divisions, at least four cell cycle divisions, at least five cell cycle divisions, or more, e.g. in a population of synchronized cells. In some embodiments, RNA effector is present at a concentration sufficient to inhibit viral replication through a period of time of at least 24 hours, at least 48 hours, at least 72 hours, or 148 hours.

[0106] In one embodiment, the RNA effector molecules are added to cells at a concentration from approximately 0.01 nM to 200 nM. In another embodiment, the RNA effector molecules are added at an amount of approximately 50 molecules per cell up to and including 500,000 molecules per cell. In another embodiment, the RNA effector molecules are added at a concentration from about 0.1 fmol/106 cells to about 1 μmol/106 cells. Alternative modes of delivery and dosages are described throughout the specification, herein.

[0107] In one embodiment the target virus is an episomal virus, i.e. a virus that does not integrate into host cell DNA, e.g. porcine circovirus (PCV). The inhibition of viral replication during cell growth and division of the host cell (e.g. Vero cells) can reduce viral load and subsequent infection of newly divided cells, e.g. that do not carry an epsiomal copy of target virus. Cells lacking a copy of target virus can then be isolated and identified, e.g. by dilution cloning or FACS analysis.

[0108] The presence of virus can be detected by monitoring the presence or absence target viral nucleic acid or protein in populations of sorted (and optionally expanded cells) using means that are well known to those of skill in the art. Methods to detect viral nucleic acid include, but are not limited to, polymerase chain reaction (PCR), reverse transcription polymerase chain reaction (RT-PCR), rapid amplification of cDNA ends (RACE), dot blot hybridization, Northern hybridization, and Southern hybridization (see, e.g. Current Protocols in Molecular Biology, Last Update: Jan. 11, 2011, Wiley Press, Edited by, Frederick M. Ausubel, Roger Brent, Fred Hutchinson, Robert E. Kingston, David D. Moore, J. G. Seidman, John A. Smith, Kevin Struhl).

[0109] Target virus protein can be detected, for example by radioimmunoassay, competitive-binding assay, ELISA, Western blot, fluorescent activated cell sorting (FACS), immunohistochemistry, immunoprecipitation, proteomics, mass spectrometry, electrophoresis, or immunofluoresence. As used herein, “immunologically detected” refers to detection of target virus using an antibody or antibody fragment. In one embodiment, the antibody selectively binds to a target viral protein. The term “selectively binds” refers to those antibodies that react with one or more antigenic determinants of the desired antigen, e.g., target virus or target viral protein, and do not react appreciably with other polypeptides. For example, in a competitive binding assay, preferably less than 5% of the antibody would bind another protein, more preferably less than 3%, still more preferably less than 2% and most preferably less than 1%. Antigenic determinants usually consist of chemically active surface groupings of molecules such as amino acids or sugar side chains and have specific three dimensional structural characteristics as well as specific charge characteristics.

[0110] Antibodies and antibody fragments of the present invention include, but are not limited to, monoclonal or polyconal antibodies, single chain antibodies, single chain Fv domains (scFv, also sometimes called sFv), Fab, Fab′, F(ab)₂, heavy chain single domain (dAb), humanized antibodies, human antibodies, and chimeric antibodies.

[0111] In one embodiment, target virus is detected using antibody directed against a viral capsid protein. Antibodies directed against virus proteins (e.g. capsid protein or virion specific antibodies) are commercially available in the art and can be obtained, for example from: Santa Cruz Biotechnology, Inc. Santa Cruz, Calif. 95060; or Rural Technologies, Inc. 1008 32nd Ave, Brookings, S. Dak. 57006; Abnova, Neihu District, Taipei City 114 Taiwan; Alternatively, antibodies can be made to virus or viral proteins using means well established in the art.

[0112] Some example commercially available antibodies against viral capsid proteins include, but are not limited to, a series of antiboes available from Santa Cruz Biotechnology, Inc. (Santa Cruz, Calif. 95060): catalog #(cat. #) sc-58123 EBV viral capsid antigen; cat. # sc-56999 VZV Major Capsid Protein (3H2); cat #sc-51945 EBV viral capsid antigen (4A8); cat. # sc-69945 Rotavirus capsid (0581); cat. # sc-69943 Rotavirus capsid (0531, cat #, sc-101363 Rotavirus capsid (2B4) Applications: WB, IF, 1HC(P), ELISA; cat. # sc-56989, HSV-1/2 ICPS Major Capsid Protein (3B6); cat. # sc-65935 Rubella Virus capsid protein (9B11); cat. # sc-65936 Rubella Virus capsid protein (10A1); cat. # sc-53559 Astrovirus (8E7); cat. # sc-58188 Rotavirus (0521); cat. # sc-52418 HIV-1 p24 (1A1); cat. # sc-34041 Hep C p19/p21 (vN-13); cat #sc-53558 Norwalk Virus (1D8); cat #sc-47699 HPV16 μl (CAMVIR-1); cat #sc-57824 HIV-1 p24 (39/6.14); cat #. sc-65624 FIV p24 (PAK3-2C1); cat #sc-52435 Rotavirus virus p42 (1-O-15); and cat. # sc-17526 Hep C NS3 (vG-20).

[0113] In one embodiment, the target virus is porcine circovirus (PCV) and the antibody is porcine circovirus (PCV) monoclonal antibody, e.g. catalog number-PCV2-A, available from Rural Technologies, Inc. 1008 32nd Ave, Brookings, S. Dak. 57006, U.S.A. DNA Cell Biol. 2009 January; 28(1):23-9. Additional antibodies to PCV include, but are not limited to, antibodies to PCV rep protein, or antibodies to PCV capsid. Monoclonal antibodies against PCV have been characterized in G. M. Allan et. al., Veterinary Immunology and Immunopathology Volume 43, Issue 4, November 1994, Pages 357-371. G. M. Allan et. al. supra further describes methods for producing mAbs to PCV. In addition, PCV rep antibodies are available, e.g. See Zhang X et al, characterization of monoclonal antibody against replication-associated protein of porcine circovirus, DNA Cell Biol. 2009 January; 28(1):23-9.

[0114] Cells that have no detectable virus can be continuously treated with RNA effector (prophalactically treated) and optionally resorted, e.g. to ensure that an isolated population of cells continues to be substantially free of contaminating virus. The prophalactically treated cells can then be used to produce immunogenic agents that are free of contaminationg virus.

[0115] In some embodiments, the RNA effector molecule is detectably labled and cells are further selected for the presence of the RNA effector molecule. RNA effector molecules can be labeled during synthesis or after synthesis with any molecule that is detectable, e.g. fluorophores such as Cy3™ (Glen Research) or radioacticve labels.

[0116] In one embodiment, binding of RNA effector to target is monitored by a fluorophore/quencher system, e.g. fluorescence resonance energy transfer (FRET). Upon binding of the oligomer sequence to its target ligand, the conformation of the oligomer changes, separating the fluorophore and quencher. Energy transfer pairs for fluorophore/quencher systems where both the donor and acceptor are covalently bound to the same nucleic acid are known to one skilled in the art. Such energy transfer pairs have been used to detect changes in oligonucleotide conformation, such as in e.g. Tyagi et al. (EP 0 745 690 A2 (1996)) and Pitner et al. (U.S. Pat. No. 5,691,145 (1997)).

[0117] In some embodiments, the isolated cells that are substantially free of contaminating virus are further tested for the presence of nucleic acid or protein from a second virus. For example, in the case where a target virus is removed from a previously established cell bank cell line that is used for production of a viral vaccine, the cell bank cell line may constitutively or inducibly express viral antigen, e.g. live or attenuated virus, or antigenic agent. Thus, in one embodiment, cells are selected for nucleic acid or protein from a second virus, e.g. immunogenic virus or viral antigen (e.g. rotavirus).

[0118] Several human, mammalian and avian viruses can infect cells, e.g. host cells. Infection results in the accumulation of immunogenic agent, such as live virus particles, which can be collected from cells or cell media after a suitable incubation period. The standard method of vaccine production consists of culturing cells, infecting with a live virus (e.g., rotavirus, influenza, yellow fever), incubation, harvesting of cells or cell media, downstream processing, and filling and finishing. For the classic inactived influenza vaccine, purification, inactivation, and stabilization of this harvested immunogenic agent yields vaccine product, which techniques are well known in the art. Host cells that are substantially devoid of contaminating virus (target virus) produced by methods described herein can be used to produce immugenic agents, e.g. vaccines, that are also devoid of contaminating virus.

[0119] Some embodiments of the invention include methods and compositions for depleting undesired viral contaminants in a virus seed stock or a sample of a virus suspected of being contaminated with an undesired virus by contacting the sample with a cell or matrix having a receptor for the unwanted virus. Generally, the virus seed stock or sample can be contacted with an agent that binds specifically to the unwanted virus (for example a cell surface receptor for the unwanted virus, an antibody or a portion or derivative thereof that specifically binds to the unwanted virus), but does not bind the desired virus. In one embodiment, the agent has at least a 3 fold higher affinity for the unwanted virus than the desired virus. For example, the agent has at least 5 fold, at least 10 fold, at least 20 fold, at least 50 fold, at least 100 fold higher affinity for the unwanted virus than the desired virus. The agent can be immobilized to a solid support to facilitate removal of adsorbed unwanted virus. In some embodiments, the receptor for unwanted virus is heparin. Heparin can be attached to an immobilized resin (for example Heparin HYPERD® resin, Pall Corp., Port Washington, N.Y.), or can be expressed on the surface of a cell. In some embodiments, the agent (e.g., heparin) can be up-regulated in cells using the methods of the present invention such that the cells adsorb and thereby deplete unwanted virus from a virus stock or sample. Alternatively, heparin matrices (see Hauk et al., 7 Mol. Ther. 419-25 (2003), describing heparin column purification of AAV2)), can be used in combination with the RNA effector molecule compositions and methods of the present invention.

[0120] For example, many viruses adhere to host cell-surface heparin, including PCV (Misinzo et al., 80 J. Virol. 3487-94 (2006); CMV (Compton et al., 193 Virology 834-41 (1993)); pseudorabies virus (Mettenleiter et al., 64 J. Virol. 278-86 (1990)); BHV-1 (Okazaki et al., 181 Virology 666-70 (1991)); swine vesicular disease virus (Escribano-Romero et al., 85 Gen. Virol. 653-63 (2004)); and HSV (WuDunn & Spear, 63 J. Virol. 52-58 (1989)). Additionally, enveloped viruses having infectivity associated with surface heparin binding include HIV-1 (Mondor et al., 72 J. Virol. 3623-34 (1998)); AAV-2 (Summerford & Samulski, 72J. Virol. 1438-45 (1998)); equine arteritis virus (Asagoe et al., 59 J. Vet. Med. Sci. 727-28 (1997)); Venezuelan equine encephalitis virus (Bernard et al., 276 Virology 93-103 (2000)); Sindbis virus (Byrnes & Griffin, 72 J. Virol. 7349-56 (1998); Chung et al., 72 J. Virol. 1577-85 (1998)); swine fever virus (Hulst et al., 75 J. Virol. 9585-95 (2001)); porcine reproductive and respiratory syndrome virus (Jusa et al., 62 Res. Vet. Sci. 261-64 (1997)); and RSV (Krusat & Streckert, 142 Arch. Virol. 1247-54 (1997)). A number of non-enveloped virus associate with cell surface heparin as well. Some picornaviridae family members associate with cell-surface heparin, including, foot-and-mouth disease virus (FMDV) (binds in in vitro culture) (Fry et al., 18 EMBO J. 543-54 (1999); Jackson et al., 70 J. Virol. 5282-87 (1996)); coxsackie virus B3 (CVB3) (Zautner et al., 77 J. Virol. 10071-77 (2003)); Theiler's murine encephalomyelitis virus (Reddi & Lipton, 76 J. Virol. 8400-07 (2002)); and certain echovirus serotypes (Goodfellow et al., 75 J. Virol. 4918-21 (2001)). In contrast, other picoraviridae, including poliovirus 3, coxsackie B2 viruses, and most echovirus serotypes (Goodfellow et al., 2001) do not adsorb to cell-surface heparin.

[0121] Hence, in particular embodiments of the present invention, a virus stock can be cleared of unwanted viral contamination, such as PCV1 contamination, by contacting the stock solution with cells expressing heparin or immobilized heparin (for example, using a heparin chromatography resin, see, e.g., Segura et al., 846 J. Chromatog. 124-31 (2007)), to obtain a virus stock that is devoid of contamination. In the instance where the expression of cell-surface heparin is modified, a RNA effector molecule can target genes associated with heparin degradation, such as genes encoding heparanase (hep) (e.g., mouse hep GeneID:15442, mouse hep 2 GeneID:545291, rat hep GeneID:64537, rat hep 2 GeneID:368128, human hep GeneID:10855, human hep 2 GeneID:60495, Xenopus hep GeneID:100145320, wild pig Sus scrofa hep GeneID:100271932, chicken hep GeneID:373981, chicken hep 2 GeneID:423834, dog hep GeneID:608707, bovine hep GeneID:8284471, Callithrix monkey hep Gene ID:100402671, Callithrix hep 2 GeneID:100407598), Pan troglodytes hep GeneID:461206, rabbit hep GeneID:100101601, Rhesus Macaque hep GeneID:707583, zebrafish hep GeneID:563020; Gingis-Velitski et al., 279 J. Biol. Chem. 44084-92 (2004)). In other embodiments, a RNA effector molecule can target genes associated with heparin synthesis or structure, such as epimerases, xylosyltransferases, galactosyltransferases, N-acetylglucosaminyl transferases, glucuronosyltransferases, or 2-O-sulfotransferases. See, e.g., Rostand & Esko, 65

[0122] As noted herein, the infectivity of influenza virus is dependent on the presence of sialic acid on the cell surface (Pedroso et al., 1236 Biochim. Biophys. Acta 323-30 (1995), as is the infectivity of rotaviruses (Isa et al., 23 Glycoconjugate J. 27-37 (2006); Fukudome et al., 172 Virol. 196-205 (1989)), other reoviruses (Paul et al., 172 Virol. 382-85 (1989)), and bovine coronaviruses (Schulze & Herrler, 73 J. Gen. Virol. 901-06 (1992)). Additional host cell-surface receptors include VACM-1 for encephalomyocarditis virus (Huberm 68 J. Virol. 3453-58 (1994); integrin VLA-2 for Echovirus (Bergelson et al., 1718-20 (1992); and members of the immunoglobulin super-family for poliovirus (Mendelson et al., 56 Cell 855-65 (1989).

[0123] In embodiments of the present invention relating to depleting undesired viral contaminants in a virus seed stock or a sample of a virus suspected of being contaminated with an undesired virus, different host cell receptors can be effected differently using RNA effector molecules. For example, if a rotavirus seed stock or sample is suspected of carrying PCV1 contamination, PCV1 can be depleted of by adsorption to (a) either cells that express cell surface heparin but not sialic acid (e.g., cells that naturally express cell-surface heparin but not sialic acid, or cells that express both heparin and sialic acid and are treated with sialidase to remove cell surface sialic acid, or cells in which the expression of heparin and/or sialic acid is manipulated through an effector RNA molecule), or (b) an immobilized heparin (e.g., a heparin chromatography resin) or an immobilized antibody. In this context, an “antibody” is any antigen-binding peptide derived from an antibody or a portion thereof, including a paratope, CDR, Fab, F_{V}, etc., as are well-known in the art. When a cell is used for the adsorption of unwanted virus, the cell can be a cell in which the unwanted virus does not replicate efficiently, or in which such replication is knocked down by the methods provided herein or by other techniques known in the art. For example, these methods can be combined with selective inhibition of circoviral replication by RNA effector molecule(s) that target the contaminating virus itself (e.g., PVC1 rep and/or cap, etc). Multiple absorptions can be performed to greatly and selectively reduce the PCV1 titer in the recovered fraction.

[0124] Conversely, embodiments of the present invention provide for the enrichment of the desired virus by expanding the virus in cells in which receptors for contaminating virus have been inhibited. For example, rotavirus can be propagated in cells that have been contacted with a RNA effector molecule that targets xylosyltransferase, thereby inhibiting heparin (a receptor for possible contaminating PCV). This result in more selective infection (and therefore amplification) of the desired virus, while reducing amplification of the unwanted virus. These methods can also be combined with selective inhibition of replication of circovirus by RNA

[0125] As used herein, immunogenic agent is an agent used to stimulate the immune system of a subject, so that one or more functions of the immune system are increased and directed towards the immunogenic agent. Immunogenic agents include vaccines Immunogenic agents can be used in the production of antibodies, both isolated polyclonal antibodies and monoclonal antibodies, using techniques known in the art. An antigen or immunogen is intended to mean a molecule containing one or more epitopes that can stimulate a host immune system to make a secretory, humoral and/or cellular immune response specific to that antigen.

[0126] As used herein, “vaccine” refers to an agent used to stimulate the immune system of a subject so that protection is provided against an antigen not recognized as a self-antigen by the subject's immune system. Immunization refers to the process of inducing a high level of antibody and/or cellular immune response in a subject, that is directed against a pathogen or antigen to which the organism has been exposed. Vaccines and immunogenic agents as used herein, refer to a subject's immune system: the anatomical features and mechanisms by which a subject produces antibodies and/or cellular immune responses against an antigenic material that invades the subject's cells or extra-cellular fluids. In the case of antibody production, the antibody so produced can belong to any of the immunological classes, such as immunoglobulins, A, D, E, G, or M. Vaccines that stimulate production of immunoglobulin A (IgA) are of interest, because IgA is the principal immunoglobulinof the secretory system in warm-blooded animals. Vaccines are likely to produce a broad range of other immune responses in addition to IgA formation, for example cellular and humoral immunity. Immune responses to antigens are well-studied and reported widely. See, e.g., Elgert, IMMUNOLOGY (Wiley Liss, Inc., 1996); Stites et al., BASIC & CLINICAL IMMUNOLOGY, 7th Ed. (Appleton & Lange, 1991). By contrast, the phrase “immune response of the host cell” refers to the responses of unicellular host organisms to the presence of foreign bodies.

[0127] The present invention provides for enhancing production of an immunogenic agent by introducing into the cell a RNA effector molecule to modulate expression of a target gene, optionally encoding a protein, that is involved with the expression of an adventitious, latent or endogenous virus. Thus, in some embodiments, the production of a viral product in a host cell is enhanced by introducing into the cell a RNA effector molecule that inhibits expression of a latent or endogenous viral protein such that the infectivity and/or load of the desired virus in the cell is increased. In some embodiments, the production of an immunogenic agent in a host cell is enhanced by introducing into the cell an additional RNA effector molecule that affects cell growth, cell division, cell viability, apoptosis, the immune response of the cells, nutrient handling, and/or other properties related to cell growth and/or division within the cell. In additional embodiments, production of an immunogenic agent in a cell is further enhanced by introducing a RNA effector molecule that modulates expression of a host cell protein involved in microbial infection or reproduction such that the infectivity and/or load of the microbe is increased. In further embodiments, production is enhanced by introducing into the cell a RNA effector molecule that transiently inhibits expression of viral proteins during the growth phase.

[0128] Thus, in some embodiments of the present invention, the immunogenic agent is a viral product, for example, naturally occurring viral strains, variants or mutants; mutagenized viruses (e.g., generated by exposure to mutagens, repeated passages and/or passage in non-permissive hosts), reassortants (in the case of segmented viral genomes), and/or genetically engineered viruses (e.g. using the “reverse genetics” techniques) having the desired phenotype. The viruses of these embodiments may be attenuated; i.e., they are infectious and can replicate in vivo, but generate low titers resulting in subclinical levels of infection that are generally non-pathogenic.

[0129] Additionally, the immunogenic agent of the present invention can be an intracellular parasite for which an immunogenic agent can be made using the compositions, cells, and/or methods of the present invention, e.g., using a RNA effector molecule. For example, alternative embodiments of the present invention provide for production of an immunogenic bacterial agent, i.e., a bacterial immunogen, in a eukaryotic cell. These bacteria include Shigella flexneri, Listeria monocytogenes, Rickettsiae tsutsugamushi, Rickettsiae rickettsiae, Mycobacterium leprae, Mycobacterium tuberculosis, Legionella pneumophila, Chlamydia ssp. Additional embodiments of the present invention provide for production of an immunogenic protozoan agent, i.e., a protozoan immunogen, in a eukaryotic cell. These protozoa include Plasmodium falciparum, Tripanosoma cruzi, and Leishmania donovani.

[0130] The modulation of expression (e.g., inhibition) of a target gene by a RNA effector molecule can be further alleviated by introducing a second RNA effector molecule, wherein at least a portion of the second RNA effector molecule is complementary to a target gene encoding a protein that mediates RNAi in the host cell. For example, the modulation of expression of a target gene can be alleviated by introducing into the cell a RNA effector molecule that inhibits expression of an Argonaute protein (e.g., argonaute-2) or other component of the RNAi pathway of the cell. In one embodiment, the immunogenic agent is a virus and expression of the virus is transiently inhibited by contacting the cell with a first RNA effector molecule targeted to a viral protein. The inhibition of expression of the viral product is then alleviated by introducing into the cell a second RNA effector molecule targeted against a gene encoding a protein of the RNAi pathway.

[0131] In another embodiment, the immunogenic agent is produced by a cell transfected with one or more retroviral vectors. Upon transfection with a first retroviral vector, expression of the retroviral vector Env and/or Gag molecule is transiently inhibited by contacting the cell with a first RNA effector molecule (i.e., targeting the env gene or gag gene), allowing more efficient transfection with a second retroviral vector. The inhibition of expression of the immunogenic agent can then be alleviated by introducing into the cell a second RNA effector molecule targeted against a gene encoding a protein of the RNAi pathway.

[0132] Additionally, the production of a desired immunogenic agent can be enhanced by introducing into the cell a RNA effector molecule during the production phase to modulate expression of a target gene encoding a protein that affects protein expression, post-translational modification, folding, secretion, and/or other processes related to production and/or recovery of the desired agent. Alternatively, the production of an immunogenic agent is enhanced by introducing into the cell a RNA effector molecule which inhibits cell growth and/or cell division during the production phase.

[0133] In some embodiments, the enhancement of production of an immunogenic agent, upon modulation of a target gene, is detected by monitoring one or more measurable bioprocess parameters, such as cell density, medium pH, oxygen levels, glucose levels, lactic acid levels, temperature, viral protein, or viral particle production. For example, viral protein production can be measured as specific productivity (SP) (the concentration of a product in solution) and can be expressed as mg/L or g/L; in the alternative, specific productivity can be expressed as pg/cell/day. An increase in SP can refer to an absolute or relative increase in the concentration of an immunogenic agent produced under two defined set of conditions. Alternatively, virus product can be titrated by well known plaque assays, measured as plaque forming units per mL (PFU/mL).

[0134] In some embodiments, the enhancement of production of an immunogenic agent is achieved by improving viability of the cells. As used herein, the term “improving cell viability” refers to an increase in cell density (e.g., as assessed by a Trypan Blue exclusion assay) or a decrease in apoptosis (e.g., as assessed using a TUNEL assay) of at least 10% in the presence of a RNA effector molecule(s), compared with the cell density or apoptosis levels in the absence of such a treatment. In some embodiments, the increase in cell density or decrease in apoptosis in response to treatment with a RNA effector molecule(s) is at least 20%, at least 30%, at least 40%, at least 50%, at least 60%, at least 70%, at least 80%, at least 90%, at least 95%, or even 100% compared to untreated cells. In some embodiments, the increase in cell density in response to treatment with a RNA effector molecule(s) is at least 2-fold, at least 5-fold, at least 10-fold, at least 20-fold, at least 50-fold, at least 100-fold, at least 1000-fold or higher than the cell density in the absence of the RNA effector molecule(s).

[0135] A “host cell,” as used herein, is any cell, cell culture, cellular biomass or tissue capable of being grown and maintained under conditions allowing for production and recovery of useful quantities of an immunogenic agent, including host cells contained within an egg. A host cell can be derived from a yeast, insect, amphibian, fish, reptile, bird, mammal or human, or can be a hybridoma cell. For example, the host cell can be a human Namalwa Burkitt lymphoma cell (BLc1-kar-Namalwa), baby hamster kidney fibroblast (BHK), CHO cell, Murine myeloma cell (NS0, SP2/0), hybridoma cell, human embryonic kidney cell (293 HEK), human retina-derived cell (PER.C6® cells, U.S. Pat. No. 7,550,284), insect cell line (Sf9, derived from pupal ovarian tissue of Spodoptera frugiperda; or Hi-5, derived from Trichoplusia ni egg cell homogenates; see also U.S. Pat. No. 7,041,500), Madin-Darby canine kidney cell (MDCK), primary mouse brain cells or tissue, primary calf lymph cells or tissue, primary monkey kidney cells, embryonated hens' egg, primary chicken embryo fibroblast (CEF), Rhesus fetal lung cell (FRhL-2), Human fetal lung cell (WI-38, MRC-5), African green monkey kidney epithelial cell (Vero, CV-1), Rhesus monkey kidney cell (LLC-MK2), or yeast cell.

[0136] Host cells can be unmodified or genetically modified (e.g., a cell from a transgenic animal). For example, CEFs from transgenic chicken eggs can have one or more genes essential for the IFN pathway, e.g. interferon receptor, STAT1, etc., has been disrupted, i.e., is a “knockout.” See, e.g., Sang, 12 Trends Biotech. 415 (1994); Perry et al., 2 Transgenic Res. 125 (1993); Stern, 212 Curr Top Micro. Immunol. 195-206 (1996); Shuman, 47 Experientia 897 (1991). Also, the cell can be modified to allow for growth under desired conditions, e.g., incubation at 30° C.

[0137] “G,” “C,” “A,” “T” and “U” each generally stand for a nucleotide that contains guanine, cytosine, adenine, thymine and uracil as a base, respectively. It should be understood that the term “deoxyribonucleotide,” “ribonucleotide,” or “nucleotide” can also refer to a modified nucleotide, as further detailed below, or a surrogate replacement moiety. The skilled person is well aware that ribonucleotide comprising a thymine base is also referred to as 5-methyl uridine and a deoxyribonucleotide comprising a uracil base is also referred to as deoxy-Uridine in the art. The skilled person is also well aware that guanine, cytosine, adenine, thymine and uracil can be replaced by other moieties without substantially altering the base pairing properties of an oligonucleotide comprising a nucleotide bearing such replacement moiety. For example, without limitation, a nucleotide comprising inosine as its base can base pair with nucleotides containing adenine, cytosine, or uracil. Hence, nucleotides containing uracil, guanine, or adenine can be replaced in the nucleotide sequences of dsRNA featured in the invention by a nucleotide containing, for example, inosine. In another example, adenine and cytosine anywhere in the oligonucleotide can be replaced with guanine and uracil, respectively to form G-U Wobble base pairing with the target mRNA. Sequences containing such replacement moieties are suitable for the compositions and methods featured in the invention.

[0138] A “RNA effector molecule” includes a RNA agent capable of modulating the expression of a target gene, or a polynucleotide agent capable of forming such an RNA agent upon being introduced into a host cell. A portion of a RNA effector molecule is substantially complementary to at least a portion of the target gene, such as the coding region, the promoter region, the 3′ untranslated region (3′-UTR), and/or the 5′-UTR of the target gene. “Portion”, when used in reference to a RNA effector molecule refers to a nucleic acid sequence of at least four nucleotides up to and including nucleic acid sequences one nucleotide shorter than the entire RNA effector molecule. That is, a portion of a RNA effector molecule having a desired length to effect complementary binding to a region of a target gene. One of skill in the art can vary the length of the “portion” that is complementary to the target gene, such that an RNA effector molecule having desired characteristics (e.g., inhibition of a target gene) is produced. Although not bound by theory, RNA effector molecules provided herein can modulate expression of target genes by one or more of a variety of mechanisms, including but not limited to, Argonaute-mediated post-transcriptional cleavage of target gene mRNA transcripts (sometimes referred to in the art as RNAi) and/or other pre-transcriptional and/or pre-translational mechanisms.

[0139] As used herein, and unless otherwise indicated, the term “complementary”, when used to describe a first nucleotide sequence in relation to a second nucleotide sequence, refers to the ability of an oligonucleotide or polynucleotide comprising the first nucleotide sequence to hybridize and form a duplex structure under certain conditions with an oligonucleotide or polynucleotide comprising the second nucleotide sequence, as understood by the skilled artisan. Such conditions can, for example, be stringent conditions, where stringent conditions can include 400 mM NaCl, 40 mM PIPES pH 6.4, 1 mM EDTA, 50° C. or 70° C. for 12 to 16 hours followed by washing. Other conditions, such as physiologically relevant conditions as can be encountered inside an organism, can apply. The skilled artisan will be able to determine the set of conditions most appropriate for a test of complementarity of two sequences in accordance with the ultimate application of the hybridized nucleotides.

[0140] Complementary sequences within a RNA effector molecule, e.g., within a dsRNA (a double-stranded ribonucleic acid) as described herein, include base-pairing of the oligonucleotide or polynucleotide comprising a first nucleotide sequence to an oligonucleotide or polynucleotide comprising a second nucleotide sequence over the entire length of one or both nucleotide sequences. Such sequences can be referred to as “fully complementary” with respect to each other herein. Where a first sequence is referred to as “substantially complementary” with respect to a second sequence herein, the two sequences can be fully complementary, or they can form one or more, but generally not more than 5, 4, 3 or 2 mismatched base pairs upon hybridization for a duplex up to 30 base pairs, while retaining the ability to hybridize under the conditions most relevant to their ultimate application, e.g., inhibition of gene expression via a RISC pathway. Where two oligonucleotides are designed to form, upon hybridization, one or more single-stranded overhangs, such overhangs shall not be regarded as mismatches with regard to the determination of complementarity. For example, a dsRNA comprising one oligonucleotide 21 nucleotides in length and another oligonucleotide 23 nucleotides in length, wherein the longer oligonucleotide comprises a sequence of 21 nucleotides that is fully complementary to the shorter oligonucleotide, can yet be referred to as “fully complementary” for the purposes described herein.

[0141] “Complementary” sequences, as used herein, can also include, or be formed entirely from, non-Watson-Crick base pairs and/or base pairs formed from non-natural and modified nucleotides, in as far as the above requirements with respect to their ability to hybridize are fulfilled. Such non-Watson-Crick base pairs includes, but are not limited to, G:U Wobble or Hoogstein base pairing.

[0142] The terms “complementary”, “fully complementary” and “substantially complementary” herein can be used with respect to the base matching between the sense strand and the antisense strand of a dsRNA, or between the antisense strand of an RNA effector molecule agent and a target sequence, as will be understood from the context of their use.

[0143] As used herein, a polynucleotide that is “substantially complementary to at least part of a target gene refers to a polynucleotide that is substantially complementary to a contiguous portion of a target gene of interest (e.g., an mRNA encoded by a target gene, the target gene's promoter region or 3′ UTR, or ERV LTR). For example, a polynucleotide is complementary to at least a part of a target mRNA if the sequence is substantially complementary to a non-interrupted portion of a mRNA encoded by a target gene

[0144] RNA effector molecules can comprise a single strand or more than one strand, and can include, e.g., double stranded RNA (dsRNA), microRNA (miRNA), antisense RNA, promoter-directed RNA (pdRNA), Piwi-interacting RNA (piRNA), expressed interfering RNA (eiRNA), short hairpin RNA (shRNA), antagomirs, decoy RNA, DNA, plasmids and aptamers. The RNA effector molecule can be single-stranded or double-stranded. A single-stranded RNA effector molecule can have double-stranded regions and a double-stranded RNA effector can have single-stranded regions. The term “double-stranded RNA” or “dsRNA”, as used herein, refers to an oligonulceotide molecule or complex of molecules having a hybridized duplex region that comprises two anti-parallel and substantially complementary nucleic acid strands, which will be referred to as having “sense” and “antisense” orientations with respect to a target RNA. The duplex region can be of any length that permits specific degradation of a desired target RNA through a RISC pathway, but will typically range from 9 to 36 base pairs in length, e.g., 15 to 30 base pairs in length.

[0145] Considering a duplex between 9 and 36 base pairs, the duplex can be any length in this range, for example, 9, 10, 11, 12, 13, 14, 15, 16, 17, 18, 19, 20, 21, 22, 23, 24, 25, 26, 27, 28, 29, 30, 31, 32, 33, 34, 35, or 36 and any sub-range therebetween, including, but not limited to 10 to 11 base pairs, 10 to 12 base pairs, 10 to 13 base pairs, 10 to 14 base pairs, 10 to 15 base pairs, 15 to 30 base pairs, 15 to 26 base pairs, 15 to 23 base pairs, 15 to 22 base pairs, 15 to 21 base pairs, 15 to 20 base pairs, 15 to 19 base pairs, 15 to 18 base pairs, 15 to 17 base pairs, 18 to 30 base pairs, 18 to 26 base pairs, 18 to 23 base pairs, 18 to 22 base pairs, 18 to 21 base pairs, 18 to 20 base pairs, 19 to 30 base pairs, 19 to 26 base pairs, 19 to 23 base pairs, 19 to 22 base pairs, 19 to 21 base pairs, 19 to 20 base pairs, 20 to 30 base pairs, 20 to 26 base pairs, 20 to 25 base pairs, 20 to 24 base pairs, 20 to 23 base pairs, 20 to 22 base pairs, 20 to 21 base pairs, 21 to 30 base pairs, 21 to 26 base pairs, 21 to 25 base pairs, 21 to 24 base pairs, 21 to 23 base pairs, or 21 to 22 base pairs. dsRNAs generated in the cell by processing with Dicer and similar enzymes are generally in the range of 19 to 22 base pairs in length.

[0146] Double-stranded oligonucleotides, e.g., dsRNAs, generated in the cell by processing with Dicer and similar enzymes are generally in the range of 19-22 base pairs in length. One strand, antisense strand, of the duplex region of a double-stranded oligonucleotide comprises a sequence that is substantially complementary to a region of a target RNA. The two strands forming the duplex structure can be from a single oligonucleotide molecule having at least one self-complementary region, or can be formed from two or more separate oligonucleotide molecules. Where the duplex region is formed from two complementary regions of a single molecule, the molecule can have a duplex region separated by a single stranded chain of nucleotides (herein referred to as a “hairpin loop”) between the 3′-end of one strand and the 5′-end of the respective other strand forming the duplex structure. The hairpin loop can comprise at least one unpaired nucleotide; in some embodiments the hairpin loop can comprise at least 2, at least 3, at least 4, at least 5, at least 6, at least 7, at least 8, at least 9, at least 10, at least 20, at least 23 or more unpaired nucleotides. In some embodiments, the hairpin loop comprises 3, 4, 5, 6, or 7. Where the two substantially complementary strands of a double-stranded oligonucleotide are comprised by separate molecules, those molecules need not, but can be covalently connected. Where the two strands are connected covalently by means other than a hairpin loop, the connecting structure is referred to as a “linker.” The term “siRNA effector molecule” is also used herein to refer to a dsRNA as described herein.

[0147] As used herein, a “target gene” refers to a nucleic acid that encodes an RNA, for example, nucleic acid sequences including, but not limited to, genes encoding a polypeptide and genes encoding non coding RNAs. By “target gene RNA” or “target RNA” is meant RNA encoded by the target gene. The skilled person is well aware that a target gene RNA that encodes a polypeptide is more commonly known as messenger RNA (mRNA). The target gene can be a gene derived from a cell, an endogenous gene, a transgene, or exogenous genes such as genes of a pathogen, for example a virus, which is present in the cell after infection thereof. The cell containing the target gene can be derived from or contained in any organism, for example a plant, animal, insect, protozoan, bacterium, or fungus. In some embodiments, the target gene encodes a protein that affects one or more aspects of the production of peptide glycosylation by a host cell, such that modulating expression of the gene permits production of a polypeptide comprising at least one terminal mannose.

[0148] The term “expression” as used herein is intended to mean the transcription to an RNA and/or translation to one or more polypeptides from a target gene coding for the sequence of the RNA and/or the polypeptide.

[0149] In some embodiments, the target gene encodes a non-coding RNA (ncRNA) that affects one or more aspects of the production of peptide glycosylation by a host cell, such that modulating expression of the gene permits production of a polypeptide comprising at least one terminal mannose. As used herein, a “non-coding RNA” refers to a target gene RNA that is not translated into a protein. The non-coding RNA is also referred to as non-protein-coding RNA (npcRNA), non-messenger RNA (mRNA), small non-messenger RNA (smRNA), and functional RNA (fRNA) in the art. The target gene from which a non-coding RNA is transcribed as the end product is also referred to as an RNA gene or non-coding RNA gene herein. Non-coding RNA genes include highly abundant and functionally important RNAs such as transfer RNA (tRNA) and ribosomal RNA (rRNA), as well as RNAs such as snoRNAs, microRNAs, siRNAs and piRNAs.

[0150] In some embodiments, the RNA effector molecule is a promoter-directed RNA (pdRNA) which is substantially complementary to at least a portion of a noncoding region of an mRNA transcript of a target gene. The pdRNA can be substantially complementary to at least a portion of the promoter region of a target gene mRNA at a site located upstream from the transcription start site, e.g., more than 100, more than 200, or more than 1,000 bases upstream from the transcription start site. Also, the pdRNA can substantially complementary to at least a portion of the 3′-UTR of a target gene mRNA transcript. For example, the pdRNA comprises dsRNA of 18 to 28 bases optionally having 3′ di- or tri-nucleotide overhangs on each strand. The dsRNA is substantially complementary to at least a portion of the promoter region or the 3′-UTR region of a target gene mRNA transcript. In another embodiment, the pdRNA comprises a gapmer consisting of a single stranded polynucleotide comprising a DNA sequence which is substantially complementary to at least a portion of the promoter or the 3′-UTR of a target gene mRNA transcript, and flanking the polynucleotide sequences (e.g., comprising the 5 terminal bases at each of the 5′ and 3′ ends of the gapmer) comprising one or more modified nucleotides, such as 2′MOE, 2′OMe, or Locked Nucleic Acid bases (LNA), which protect the gapmer from cellular nucleases.

[0151] pdRNA can be used to selectively increase, decrease, or otherwise modulate expression of a target gene. Without being limited to theory, pdRNAs can modulate expression of target genes by binding to endogenous antisense RNA transcripts which overlap with noncoding regions of a target gene mRNA transcript, and recruiting Argonaute proteins (in the case of dsRNA) or host cell nucleases (e.g., RNase H) (in the case of gapmers) to selectively degrade the endogenous antisense RNAs. In some embodiments, the endogenous antisense RNA negatively regulates expression of the target gene and the pdRNA effector molecule activates expression of the target gene. Thus, in some embodiments, pdRNAs can be used to selectively activate the expression of a target gene by inhibiting the negative regulation of target gene expression by endogenous antisense RNA. Methods for identifying antisense transcripts encoded by promoter sequences of target genes and for making and using promoter-directed RNAs are known. See, e.g., WO 2009/046397.

[0152] Expressed interfering RNA (eiRNA) can be used to selectively increase, decrease, or otherwise modulate expression of a target gene. Typically, eiRNA, the dsRNA is expressed in the first transfected cell from an expression vector. In such a vector, the sense strand and the antisense strand of the dsRNA can be transcribed from the same nucleic acid sequence using e.g., two convergent promoters at either end of the nucleic acid sequence or separate promoters transcribing either a sense or antisense sequence. Alternatively, two plasmids can be cotransfected, with one of the plasmids designed to transcribe one strand of the dsRNA while the other is designed to transcribe the other strand. Methods for making and using eiRNA effector molecules are known in the art. See, e.g., WO 2006/033756; U.S. Patent Pubs. No. 2005/0239728 and No. 2006/0035344.

[0153] In some embodiments, the RNA effector molecule comprises a small single-stranded Piwi-interacting RNA (piRNA effector molecule) which is substantially complementary to at least a portion of a target gene, as defined herein, and which selectively binds to proteins of the Piwi or Aubergine subclasses of Argonaute proteins. Without being limited to a particular theory, it is believed that piRNA effector molecules interact with RNA transcripts of target genes and recruit Piwi and/or Aubergine proteins to form a ribonucleoprotein (RNP) complex that induces transcriptional and/or post-transcriptional gene silencing of target genes. A piRNA effector molecule can be about 10 to 50 nucleotides in length, about 25 to 39 nucleotides in length, or about 26 to 31 nucleotides in length. See, e.g., U.S. Patent Pub. No. 2009/0062228.

[0154] In some embodiments, the RNA effector molecule is a siRNA or shRNA effector molecule introduced into a cell by introducing into the cell an invasive bacterium containing one or more siRNA or shRNA effector molecules or DNA encoding one or more siRNA or shRNA effector molecules (a process sometimes referred to as transkingdom RNAi (tkRNAi)). The invasive bacterium can be an attenuated strain of Listeria, Shigella, Salmonella, E. coli, or Bifidobacteriae, or a non-invasive bacterium that has been genetically modified to increase its invasive properties, e.g., by introducing one or more genes that enable invasive bacteria to access the cytoplasm of cells. Examples of such cytoplasm-targeting genes include listeriolysin O of Listeria and the invasin protein of Yersinia pseudotuberculosis. Methods for delivering RNA effector molecules to animal cells to induce transkingdom RNAi (tkRNAi) are known in the art. See, e.g., U.S. Patent Pubs. No. 2008/0311081 and No. 2009/0123426. In one embodiment, the RNA effector molecule is a siRNA molecule. In one embodiment, the RNA effector molecule is not a shRNA molecule.

[0155] MicroRNAs are a highly conserved class of small RNA molecules that are transcribed from DNA in the genomes of plants and animals, but are not translated into protein. Pre-microRNAs are processed into miRNAs. Processed microRNAs are single stranded ˜17-25 nucleotide (nt) RNA molecules that become incorporated into the RNA-induced silencing complex (RISC) and have been identified as key regulators of development, cell proliferation, apoptosis and differentiation. They are believed to play a role in regulation of gene expression by binding to the 3′-untranslated region of specific mRNAs. MicroRNAs cause post-transcriptional silencing of specific target genes, e.g., by inhibiting translation or initiating degradation of the targeted mRNA. In some embodiments, the miRNA is completely complementary with the target nucleic acid. In other embodiments, the miRNA has a region of noncomplementarity with the target nucleic acid, resulting in a “bulge” at the region of non-complementarity. In some embodiments, the region of noncomplementarity (the bulge) is flanked by regions of sufficient complementarity, e.g., complete complementarity, to allow duplex formation. For example, the regions of complementarity are at least 8 to 10 nucleotides long (e.g., 8, 9, or 10 nucleotides long).

[0156] miRNA can inhibit gene expression by, e.g., repressing translation, such as when the miRNA is not completely complementary to the target nucleic acid, or by causing target RNA degradation, when the miRNA binds its target with perfect or a high degree of complementarity. In further embodiments, the RNA effector molecule can include an oligonucleotide agent which targets an endogenous miRNA or pre-miRNA. For example, the RNA effector can target an endogenous miRNA which negatively regulates expression of a target gene, such that the RNA effector alleviates miRNA-based inhibition of the target gene. The oligonucleotide agent can include naturally occurring nucleobases, sugars, and covalent internucleotide (backbone) linkages and/or oligonucleotides having one or more non-naturally-occurring features that confer desirable properties, such as enhanced cellular uptake, enhanced affinity for the endogenous miRNA target, and/or increased stability in the presence of nucleases. In some embodiments, an oligonucleotide agent designed to bind to a specific endogenous miRNA has substantial complementarity, e.g., at least 70%, 80%, 90%, or 100% complementary, with at least 10, 20, or 25 or more bases of the target miRNA. Exemplary oligonucleiotde agents that target miRNAs and pre-miRNAs are described, for example, in U.S. Patent Pubs. No. 20090317907, No. 20090298174, No. 20090291907, No. 20090291906, No. 20090286969, No. 20090236225, No. 20090221685, No. 20090203893, No. 20070049547, No. 20050261218, No. 20090275729, No. 20090043082, No. 20070287179, No. 20060212950, No. 20060166910, No. 20050227934, No. 20050222067, No. 20050221490, No. 20050221293, No. 20050182005, and No. 20050059005.

[0157] A miRNA or pre-miRNA can be 10 to 200 nucleotides in length, for example from 16 to 80 nucleotides in length. Mature miRNAs can have a length of 16 to 30 nucleotides, such as 21 to 25 nucleotides, particularly 21, 22, 23, 24, or 25 nucleotides. miRNA precursors can have a length of 70 to 100 nucleotides and can have a hairpin conformation. In some embodiments, miRNAs are generated in vivo from pre-miRNAs by the enzymes cDicer and Drosha. miRNAs or pre-miRNAs can be synthesized in vivo by a cell-based system or can be chemically synthesized. miRNAs can comprise modifications which impart one or more desired properties, such as superior stability, hybridization thermodynamics with a target nucleic acid, targeting to a particular tissue or cell-type, and/or cell permeability, e.g., by an endocytosis-dependent or -independent mechanism. Modifications can also increase sequence specificity, and consequently decrease off-site targeting

[0158] In some embodiments, the RNA effector molecule comprises a single-stranded oligonucleotide that interacts with and directs the cleavage of RNA transcripts of a target gene. For example, single stranded RNA effector molecules comprise a 5′ modification including one or more phosphate groups or analogs thereof to protect the effector molecule from muclease degradation.

[0159] In some embodiments, the RNA effector molecule comprises an antagomir. Antagomirs are single stranded, double stranded, partially double stranded or hairpin structures that target a microRNA. An antagomir consists essentially of or comprises at least 10 or more contiguous nucleotides substantially complementary to an endogenous miRNA and more particularly a target sequence of an miRNA or pre-miRNA nucleotide sequence. Antagomirs preferably have a nucleotide sequence sufficiently complementary to a miRNA target sequence of about 12 to 25 nucleotides, such as about 15 to 23 nucleotides, to allow the antagomir to hybridize to the target sequence. More preferably, the target sequence differs by no more than 1, 2, or 3 nucleotides from the sequence of the antagomir. In some embodiments, the antagomir includes a non-nucleotide moiety, e.g., a cholesterol moiety, which can be attached, e.g., to the 3′ or 5′ end of the oligonucleotide agent.

[0160] In some embodiments, antagomirs are stabilized against nucleolytic degradation by the incorporation of a modification, e.g., a nucleotide modification. For example, in some embodiments, antagomirs contain a phosphorothioate comprising at least the first, second, and/or third internucleotide linkages at the 5′ or 3′ end of the nucleotide sequence. In further embodiments, antagomirs include a 2′-modified nucleotide, e.g., a 2′-deoxy, 2′-deoxy-2′-fluoro, 2′-O-methyl, 2′-O-methoxyethyl (2′-O-MOE), 2′-O-aminopropyl (2′-O-AP), 2′-O-dimethylaminoethyl (2′-O-DMAOE), 2′-O-dimethylaminopropyl (2′-O-DMAP), 2′-O-dimethylaminoethyloxyethyl (2′-O-DMAEOE), or 2′-O—N-methylacetamido (2′-O-NMA). In some embodiments, antagomirs include at least one 2′-O-methyl-modified nucleotide

[0161] In some embodiments, the RNA effector molecule comprises an aptamer which binds to a non-nucleic acid ligand, such as a small organic molecule or protein, e.g., a transcription or translation factor, and subsequently modifies (e.g., inhibits) activity. An aptamer can fold into a specific structure that directs the recognition of a targeted binding site on the non-nucleic acid ligand. Aptamers can contain any of the modifications described herein.

[0162] In some embodiments, the RNA effector molecule is a single-stranded “antisense” nucleic acid having a nucleotide sequence that is complementary to at least a portion of a “sense” nucleic acid of a target gene, e.g., the coding strand of a double-stranded cDNA molecule or an RNA sequence, e.g., a pre-mRNA, mRNA, miRNA, or pre-miRNA. Accordingly, an antisense nucleic acid can form hydrogen bonds with a sense nucleic acid target. In an alternative embodiment, the RNA effector molecule comprises a duplex region of at least 9 nucleotides in length.

[0163] Given a coding strand sequence (e.g., the sequence of a sense strand of a cDNA molecule), antisense nucleic acids can be designed according to the rules of Watson-Crick base pairing. The antisense nucleic acid can be complementary to a portion of the coding or noncoding region of a RNA, e.g., the region surrounding the translation start site of a pre-mRNA or mRNA, e.g., the 5′ UTR. An antisense oligonucleotide can be, for example, about 10 to 25 nucleotides in length (e.g., 11, 12, 13, 14, 15, 16, 18, 19, 20, 21, 22, 23, or 24 nucleotides in length). In some embodiments, the antisense oligonucleotide comprises one or more modified nucleotides, e.g., phosphorothioate derivatives and/or acridine substituted nucleotides, designed to increase its biological stability of the molecule and/or the physical stability of the duplexes formed between the antisense and target nucleic acids. Antisense oligonucleotides can comprise ribonucleotides only, deoxyribonucleotides only (e.g., oligodeoxynucleotides), or both deoxyribonucleotides and ribonucleotides. For example, an antisense agent consisting only of ribonucleotides can hybridize to a complementary RNA and prevent access of the translation machinery to the target RNA transcript, thereby preventing protein synthesis. An antisense molecule including only deoxyribonucleotides, or deoxyribonucleotides and ribonucleotides, can hybridize to a complementary RNA and the RNA target can be subsequently cleaved by an enzyme, e.g., RNAse H, to prevent translation. The flanking RNA sequences can include 2′-β-methylated nucleotides, and phosphorothioate linkages, and the internal DNA sequence can include phosphorothioate internucleotide linkages. The internal DNA sequence is preferably at least five nucleotides in length when targeting by RNAseH activity is desired.

[0164] In some embodiments, a plurality of RNA effector molecules is used to modulate expression of one or more target genes. A “plurality” refers to at least 2 or more RNA effector molecules e.g., 3, 4, 5, 6, 7, 8, 9, 10, 11, 12, 13, 14, 15, 16, 17, 18, 19, 20, 30, 40, 50, 60, 80, 100 RNA effector molecules or more. “Plurality” can also refer to at least 2 or more target genes, e.g., 3, 4, 5, 6, 7, 8, 9, 10, 11, 12, 13, 14, 15, 16, 17, 18, 19, 20, 30, 40, 50, 60, 70, 80, 90, 100 target genes or more.

[0165] The skilled artisan will recognize that the term “oligonucleotide” or “nucleic acid molecule” encompasses not only nucleic acid molecules as expressed or found in nature, but also analogs and derivatives of nucleic acids comprising one or more ribo- or deoxyribo-nucleotide/nucleoside analogs or derivatives as described herein or as known in the art. A “nucleoside” includes a nucleoside base and a ribose (2′-dooxy) sugar, and a “nucleotide” is a nucleoside with one, two or three phosphate moieties. The terms “nucleoside” and “nucleotide” can be considered to be equivalent as used herein. An oligonucleotide can be modified in the nucleobase structure or in the ribose-phosphate backbone structure, e.g., as described herein below, including the modification of a RNA nucleotide into a DNA nucleotide. The molecules comprising nucleoside analogs or derivatives must retain the ability to form a duplex.

[0166] As non-limiting examples, an oligonucleotide can also include at least one modified nucleoside including but not limited to a 2′-O-methyl modified nucleoside, a nucleoside comprising a 5′ phosphorothioate group, a terminal nucleoside linked to a cholesterol derivative or dodecanoic acid bisdecylamide group, a locked nucleoside, an abasic nucleoside, a 2′-deoxy-2′-fluoro modified nucleoside, a 2′-amino-modified nucleoside, 2′-alkyl-modified nucleoside, morpholino nucleoside, a phosphoramidate or a non-natural base comprising nucleoside, or any combination thereof. Alternatively, an oligonucleotide can comprise at least two modified nucleosides, at least 3, at least 4, at least 5, at least 6, at least 7, at least 8, at least 9, at least 10, at least 15, at least 20 or more, up to the entire length of the oligonucleotide. The modifications need not be the same for each of such a plurality of modified nucleosides in an oligonucleotide. When RNA effector molecule is double stranded, each strand can be independently modified as to number, type and/or location of the modified nucleosides. In one embodiment, modified oligonucleotides contemplated for use in methods and compositions described herein are peptide nucleic acids (PNAs) that have the ability to form the required duplex structure and that permit or mediate the specific degradation of a target RNA via a RISC pathway.

[0167] Similarly, the skilled artisan will recognize that the term “RNA molecule” or “ribonucleic acid molecule” encompasses not only RNA molecules as expressed or found in nature, but also analogs and derivatives of RNA comprising one or more ribonucleotide/ribonucleoside analogs or derivatives as described herein or as known in the art. Strictly speaking, a “ribonucleoside” includes a nucleoside base and a ribose sugar, and a “ribonucleotide” is a ribonucleoside with one, two or three phosphate moieties. The terms “ribonucleoside” and “ribonucleotide” can be considered to be equivalent as used herein. The RNA can be modified in the nucleobase structure or in the ribose-phosphate backbone structure, e.g., as described herein. The molecules comprising ribonucleoside analogs or derivatives must retain the ability to form a duplex. As non-limiting examples, a RNA molecule can also include at least one modified ribonucleoside including but not limited to a 2′-O-methyl modified nucleoside, a nucleoside comprising a 5′ phosphorothioate group, a terminal nucleoside linked to a cholesterol derivative or dodecanoic acid bisdecylamide group, a locked nucleoside, an abasic nucleoside, a 2′-deoxy-2′-fluoro modified nucleoside, a 2′-amino-modified nucleoside, 2′-alkyl-modified nucleoside, morpholino nucleoside, a phosphoramidate or a non-natural base comprising nucleoside, or any combination thereof. Alternatively, a RNA molecule can comprise at least two modified ribonucleosides, at least 3, at least 4, at least 5, at least 6, at least 7, at least 8, at least 9, at least 10, at least 15, at least 20 or more, up to the entire length of the dsRNA molecule. The modifications need not be the same for each of such a plurality of modified ribonucleosides in a RNA molecule. In one embodiment, modified RNAs contemplated for use in methods and compositions described herein are peptide nucleic acids (PNAs) that have the ability to form the required duplex structure and that permit or mediate the specific degradation of a target RNA via a RISC pathway.

[0168] In one aspect, the oligonucleotides of the present invention can include a deoxyribonucleoside residue. In such an instance, a RNA effector molecule agent can comprise one or more deoxynucleosides, including, for example, a deoxynucleoside overhang(s), or one or more deoxynucleosides within the double stranded portion of a dsRNA. It is self evident that under no circumstances is a double stranded DNA molecule encompassed by the term “RNA effector molecule”.

[0169] A double-stranded oligonucleotide can include one or more single-stranded nucleotide overhangs. As used herein, the term “nucleotide overhang” refers to at least one unpaired nucleotide that protrudes from the terminus of a duplex structure of a double-stranded oligonucleotide, e.g., a dsRNA. For example, when a 3′-end of one strand of double-stranded oligonucleotide extends beyond the 5′-end of the other strand, or vice versa, there is a nucleotide overhang. A double-stranded oligonucleotide can comprise an overhang of at least one nucleotide; alternatively the overhang can comprise at least two nucleotides, at least three nucleotides, at least four nucleotides, at least five nucleotides or more. A nucleotide overhang can comprise or consist of a nucleotide/nucleoside analog. The overhang(s) can be on the sense strand, the antisense strand or any combination thereof. Furthermore, the nucleotide(s) of an overhang can be present on the 5′ end, 3′ end, or both ends of either an antisense or sense strand of a dsRNA.

[0170] The antisense strand of a double-stranded oligonucleotide has a 1 to 10 nucleotide overhang at the 3′ end and/or the 5′ end, such as a double-stranded oligonucleotide having a 1 to 10 nucleotide overhang at the 3′ end and/or the 5′ end. One or more of the internucloside linkages in the overhang can be replaced with a phosphorothioate. In some embodiments, the overhang comprises one or more deoxyribonucleoside or the overhang comprises the sequence 5′-dTdT-3. In some embodiments, overhang comprises the sequence 5′-dT*dT-3, wherein * is a phosphorothioate internucleoside linkage.

[0171] Without being bound theory, double-stranded oligonucleotides having at least one nucleotide overhang have unexpectedly superior inhibitory properties relative to their blunt-ended counterparts. Moreover, the presence of a nucleotide overhang on only one strand, at one end of a dsRNA, strengthens the interference activity of the double-stranded oligonucleotide, without affecting its overall stability.

[0172] dsRNA having only one overhang has proven particularly stable and effective in vivo, as well as in a variety of cells, cell culture media, blood, and serum. Generally, the single-stranded overhang is located at the 3′-terminal end of an antisense strand or, alternatively, at the 3′-terminal end of a sense strand. The dsRNA having an overhang on only one end will also have one blunt end, generally located at the 5′-end of the antisense strand. Such dsRNAs have superior stability and inhibitory activity, thus allowing administration at low dosages, i.e., less than 5 mg/kg body weight of the recipient per day. In one embodiment, the antisense strand of a dsRNA has a 1 to 10 nucleotide overhang at the 3′ end and/or the 5′ end. In one embodiment, the sense strand of a dsRNA has a 1 to 10 nucleotide overhang at the 3′ end and/or the 5′ end. In another embodiment, one or more of the nucleotides in the overhang is replaced with a nucleoside thiophosphate.

[0173] The terms “blunt” or “blunt ended” as used herein in reference to double-stranded oligonucleotide mean that there are no unpaired nucleotides or nucleotide analogs at a given terminal end of a double-stranded oligonucleotide, i.e., no nucleotide overhang. One or both ends of a double-stranded oligonucleotide can be blunt. Where both ends are blunt, the oligonucleotide is said to be double-blunt ended. To be clear, a “double-blunt ended” oligonucleotide is a double-stranded oligonucleotide that is blunt at both ends, i.e., no nucleotide overhang at either end of the molecule. Most often such a molecule will be double-stranded over its entire length. When only one end of is blunt, the oligonucleotide is said to be single-blunt ended. To be clear, a “single-blunt ended” oligonucleotide is a double-stranded oligonucleotide that is blunt at only one end, i.e., no nucleotide overhang at one end of the molecule. Generally, a single-blunt ended oligonucleotide is blunt ended at the 5′-end of sense stand.

[0174] The term “antisense strand” refers to the strand of an RNA effector molecule, e.g., a dsRNA, which includes a region that is substantially complementary to a target sequence. The term “region of complementarity” refers to the region on the antisense strand that is substantially complementary to a sequence, for example a target sequence, as defined herein. Where the region of complementarity is not fully complementary to the target sequence, the mismatches can be in the internal or terminal regions of the molecule. Generally, the most tolerated mismatches are in the terminal regions, e.g., within 5, 4, 3, or 2 nucleotides of the 5′ and/or 3′ terminus.

[0175] The term “sense strand,” as used herein, refers to the strand of an RNA effector molecule that includes a region that is substantially complementary to a region of the antisense strand as that term is defined herein.

[0176] The term “SNALP” refers to a stable nucleic acid-lipid particle. A SNALP represents a vesicle of lipids coating a reduced aqueous interior comprising a nucleic acid such as an RNA effector molecule or a plasmid from which an RNA effector molecule is transcribed. SNALPs are described, e.g., in U.S. Patent Pubs. No. 2006/0240093, No. 2007/0135372; No. 2009/0291131; U.S. patent application Ser. No. 12/343,342; No. 12/424,367.

[0177] In some embodiments, RNA effector molecule is a double-stranded oligonucleotide comprising a sense strand and an antisense strand, wherein the antisense strand has a region of complementary to at least part of a target gene RNA. The sense strand includes a region that is complementary to the antisense strand, such that the two strands hybridize and form a duplex structure when combined under suitable conditions. Typically, region of complementarity is 30 nucleotides or less in length, generally 10 to 26 nucleotides in length, preferably 18 to 25 nucleotides in length, and most preferably 19 to 24 nucleotides in length. Upon contact with a cell expressing the target gene, the RNA effector molecule inhibits the expression of the target gene by at least 10% as assayed by, for example, a PCR or branched DNA (bDNA)-based method, or by a protein-based method, such as by Western blot. Expression of a target gene in cell culture can be assayed by measuring target gene mRNA levels, e.g., by bDNA or TaqMan assay, or by measuring protein levels, e.g., by immunofluorescence analysis

[0178] Administering or introducing into the cell means that a cell is contacted with at least one RNA effector molecule, meaning the treatment of a cell with an agent e.g., at least one RNA effector molecule, often prepared in a composition comprising a delivery agent (e.g., LIPOFECTAMINE™ transfection reagent). The step of contacting a cell with an RNA effector molecule(s) can be repeated more than once (e.g., twice, 3×, 4×, 5×, 6×, 7×, 8×, 9×, 10×, 11×, 12×, 13×, 14×, 15×, 16×, 17×, 18×, 19×, 20×, 30×, 40×, 50×, 60×, 70×, 80×, 90×, 100× or more). In one embodiment, the cell is contacted such that the target gene is modulated only transiently, e.g., by addition of a RNA effector molecule composition to the cell culture medium used for the production of an immunogenic agent where the presence of the RNA effector molecules dissipates over time, i.e., the RNA effector molecule is not constitutively expressed in the cell.

[0179] “Introducing into a cell,” when referring to a RNA effector molecule, means facilitating or effecting uptake or absorption into the cell, as is understood by those skilled in the art. Absorption or uptake of a RNA effector molecule can occur through unaided diffusive or active cellular processes, or by auxiliary agents or devices. Further approaches are described herein or known in the art.

[0180] For example, in some embodiments, a reagent that facilitates RNA effector molecule uptake comprises a charged lipid, an emulsion, a liposome, a cationic or non-cationic lipid, an anionic lipid, a transfection reagent or a penetration enhancer as described herein. In one embodiment, the reagent that facilitates RNA effector molecule uptake used herein comprises a charged lipid as described in U.S. Patent Application Ser. No. 61/267,419, filed Dec. 7, 2009.

[0181] The term “modulates expression of,” and the like, in so far as it refers to a target gene, herein refers to the modulation of expression of a target gene, as manifested by a change (e.g., an increase or a decrease) in the amount of target gene mRNA that can be isolated from or detected in a first cell or group of cells in which a target gene is transcribed and that has or have been treated such that the expression of a target gene is modulated, as compared to a second cell or group of cells substantially identical to the first cell or group of cells but that has or have not been so treated (control cells). The degree of modulation can be expressed in terms of:

$$\frac{( mRNA in control cells ) - ( mRNA in treated cells )}{( mRNA in control cells )} \cdot 100 \%$$

[0182] Alternatively, the degree of modulation can be given in terms of a parameter that is functionally linked to target gene expression, e.g., the amount of protein encoded by a target gene, or the number of cells displaying a certain phenotype, e.g., stabilization of microtubules. In principle, target gene modulation can be determined in any host cell expressing the target gene, either constitutively or by genomic engineering, and by any appropriate assay known in the art.

[0183] For example, in certain instances, expression of a target gene is inhibited. For example, expression of a target gene is inhibited by at least about 10%, 15%, 20%, 25%, 30%, 35%, 40%, 45%, or 50% by administration of an RNA effector molecule provided herein. In some embodiments, a target gene is inhibited by at least about 60%, 70%, or 80% by administration of a RNA effector molecule. In some embodiments, a target gene is inhibited by at least about 85%, 90%, or 95% or more by administration of a RNA effector molecule as described herein. In other instances, expression of a target gene is activated by at least about 10%, 20%, 25%, 50%, 100%, 200%, 400% or more by administration of a RNA effector molecule provided herein.

[0184] As used herein, a “target gene” refers to a gene that expresses a protein or regulates expression of a nucleic acid (i.e., non-encoding genes) that affects one or more aspects of the production of an immunogenic agent by a cell, such that modulating expression of the gene enhances production of the immunogenic agent. Target genes can be derived from the host cell, latent in the host cell, endogenous to the host cell (present in the host cell genome), transgenes (gene constructs inserted at ectopic sites in the host cell genome), or derived from a pathogen (e.g., a virus, fungus or bacterium) which is capable of infecting the cell or the subject who will use the an immunogenic agent or derivatives or products thereof (e.g., vaccines for humans).

[0185] In some embodiments, the target gene is a regulatory element or gene of an ERV of the cell. For example, in particular embodiments the target gene can encode a polypeptide or protein, such as an ERV LTR, env protein, or gag protein. In some embodiments, the target gene is a gene of a latent virus such as a herpesvirus or adenovirus. In particular embodiments, for example, the target gene can encode a polypeptide or protein, such as a latent HSV glycoprotein D or PCV-1 Rep protein. In some embodiments, the target gene is an endogenous cellular (i.e., non-viral) gene. For example, in particular embodiments the target gene can encode a polypeptide or protein. The target gene can also encode a host cell protein that directly or indirectly affects one or more aspects of the production of an immunogenic agent. Examples of target genes that affect the production of desired biological polypeptides include genes encoding proteins involved in the secretion, folding or post-translational modification of polypeptides (e.g., glycosylation, deamidation, disulfide bond formation, methionine oxidation, or pyroglutamation); genes encoding proteins that influence a property or phenotype of the host cell (e.g., growth, viability, cellular pH, cell cycle progression, apoptosis, carbon metabolism or transport, lactate formation, susceptibility to viral infection or RNAi uptake, activity or efficacy); and genes encoding proteins that impair the production of an immunogenic agent by the host cell (e.g., a protein that binds or co-purifies with an immunogenic agent).

[0186] Production of an immunogenic agent may be enhanced by reducing the expression of a protein that binds to the an immunogenic agent or vector. For example, in producing a viral protein it may be advantageous to reduce or inhibit expression of a receptor/ligand produced by a latent virus or ERV, so that its production in the cell does not inhibit super-infection by the desired virus or recombinant vector. Additionally, in producing a viral protein, it may be advantageous to reduce or inhibit expression of its natural receptor/ligand so that its production in the cell does not elicit a biological response (e.g., an immune response of the host cell). It will be known to a skilled artisan that a receptor can be a cell surface receptor or an internal (e.g., nuclear) receptor. The expression of the binding partner can be modulated by contacting the host cell with an RNA effector molecule directed at the receptor gene according to methods described herein.

[0187] The target gene may encode a host cell protein that indirectly affects the production of an immunogenic agent such that inhibiting expression of the target gene enhances production of the immunogenic agent. For example, the target gene can encode an abundantly expressed host cell protein that does not influence directly production of the immunogenic agent, but indirectly decreases its production, for example by utilizing cellular resources that could otherwise enhance production of the immunogenic agent.

[0188] For example, immunogenic agent such as proteins and viral products (including some live attenuated viruses) produced in cell culture on an industrial-scale are typically secreted by cultured cells and recovered and purified from the surrounding cell culture media. In general, the rate of protein production and the yield of recovered protein is directly related to the rate of protein folding and secretion by the host cells. For example, an accumulation of misfolded proteins in the endoplasmic reticulum (ER) of host cells can slow or stop secretion via the unfolded protein response (UPR) pathway. The UPR is triggered by stress-sensing proteins in the ER membrane which detect excess unfolded proteins. UPR activation leads to the upregulation of chaperone proteins (e.g., Bip) which bind to misfolded proteins and facilitate proper folding. UPR activation also upregulates the transcription factors XBP-1 and CHOP. CHOP generally functions as a negative regulator of cell growth, differentiation and survival, and its upregulation via the UPR causes cell cycle arrest and increases the rate of protein folding and secretion to clear excess unfolded proteins from the cell. Hence, cell cycle may be promoted initially, then repressed during virus production phase to increase viral product yield. An increase the rate of immunogenic protein secretion by the host cells can be measured by, e.g., monitoring the amount of protein present in the culture media over time

[0189] Proteins expressed in eukaryotic cells can undergo several post-translational modifications that may impair immunogenic agent production and/or the structure, biological activity, stability, homogeneity, and/or other properties of the immunogenic agent. Many of these modifications occur spontaneously during cell growth and polypeptide expression and can occur at several sites, including the peptide backbone, the amino acid side-chains, and the amino and/or carboxyl termini of a given polypeptide. In addition, a given polypeptide can comprise several different types of modifications. For example, proteins expressed in avian and mammalian cells can be subject to acetylation, acylation, ADP-ribosylation, amidation, ubiquitination, methionine oxidation, disulfide bond formation, methylation, demethylation, sulfation, formation of cysteine, formation of pyroglutamate, formylation, gamma-carboxylation, hydroxylation, iodination, myristoylation, oxidation, proteolytic processing, phosphorylation, prenylation, racemization, glycosylation, gluconoylation, sequence mutations, N-terminal glutamine cyclization and deamidation, and asparagine deamidation.

[0190] Post-translational modifications can require additional bioprocess steps to separate modified and unmodified polypeptides, increasing costs and reducing efficiency of immunogenic agent production. Accordingly, in some embodiments, in production of an immunogenic polypeptide agent in a cell is enhanced by modulating the expression of a target gene encoding a protein that affects post-translational modification. In additional embodiments, immunogenic agent production is enhanced by modulating the expression of a first target gene encoding a protein that affects a first post-translational modification, and modulating the expression of a second target gene encoding a protein that affects a second post-translational modification.

[0191] When the immunogenic agent comprise a glycoprotein, such as a viral product having viral surface membrane proteins, viral production may be enhanced by modulating expression of a target gene that encodes a protein involved in protein glycosylation. Glycosylation patterns are often important determinants of the structure and function of mammalian glycoproteins, and can influence the solubility, thermal stability, protease resistance, antigenicity, immunogenicity, serum half-life, stability, and biological activity of glycoproteins.

[0192] The use of cell-based bioprocesses for the manufacture of immunogenic viral agent is enhanced, in some embodiments, by modulating expression of a target gene affecting the host cell's reaction to viral infection. For example, in some embodiments the target gene is an avian cell interferon protein or a protein associated with interferon signaling. In particular, the gene may be an interferon gene such as IFN-α, Gene ID 396398; IFN-β, Gene ID 554219; or IFN-γ, Gene ID 396054. The gene may be an interferon receptor such as IFNAR1 (interferon alpha, beta and omega receptor 1), Gene ID: 395665; IFNAR2, Gene ID: 395664; IFNGR1 (interferon gamma receptor 1), Gene ID: 421685; or IFNGR2, Gene ID: 418502. The gene may be associated with interferon signaling such as STAT-1 (signal transducer and activator of transcription 1), Gene ID:424044; STAT-2, STAT-3, Gene ID:420027; STAT-4, Gene ID: 768406; STAT-5, Gene ID:395556; JAK-1 (Janus kinase 1), Gene ID: 395681; JAK-2, Gene ID: 374199; JAK-3, Gene ID:395845; IRF1, Gene ID: 396384; IRF2, Gene ID:396115; IRF3; IRF4, Gene ID:374179; IRF5, Gene ID: 430409; IRF6, Gene ID: 419863; IRF7, Gene ID:396330; IRF8, Gene ID:396385; IRF 9; or IRF10, Gene ID: 395243. The gene may encode an interferon-induced protein such as 2′,5′ oligoadenylate synthetases (2-5 OAS), an interferon induced antiviral protein; RNaseL (ribonuclease L (2′,5′-oligoisoadenylate synthetase-dependent), Gene ID: 424410 (Silverman et al., 14 J. Interferon Res. 101-04 (1994)); dsRNA-dependent protein kinase (PKR) aka: eukaryotic translation initiation factor 2-alpha kinase 2 (EIF2AK2) (Li et al., 106 PNAS 16410-05 (2009)); Mx (MX1 myxovirus (influenza virus) resistance 1, interferon-inducible protein p78), Gene ID: 395313 (Haller et al., 9 Microbes Infect. 1636-43 (2007)); IFITM1 (Brass et al., 139 Cell 1243-54 (2009)); IFITM2 (id.); IFITM3 (id.); Proinflammatory cytokines; MYD88 (myeloid differentiation primary response gene) up-regulated upon viral challenge, Gene ID: 420420 (Hghighi et al., Clin. Vaccine Immunol. (Jan. 13, 2010)); or TRIF (toll-like receptor adaptor molecule 1), Gene ID: 100008585(id.).

[0193] The use of bioprocesses for the manufacture of an immunogenic agent is enhanced, in some embodiments, by modulating expression of a target gene affecting the susceptibility of a cell to viral infection. For example, in some embodiments, the target gene is an avian cell protein that mediates viral infectivity, such as TLR3 that detects dsRNA, Gene ID: 422720 (all Gene IDs referring to the National Center for Biotechnology Information “Entrez Gene” web site); TLR7 that detects ssRNA, Gene ID: 418638; TLR21, that recognizes unmethylated DNA with CpG motifs, Gene ID: 415623, RIG-1 involved with viral sensing (Myong et al., 323 Science 1070-74 (2009)); LPGP2 and other RIG-1-like receptors, which are positive regulators of viral sensing (Satoh et al., 107 PNAS 1261-62 (2010); Nakhaei et al., 2009); TRIM25, Gene ID: 417401 (Gack et al., 5 Cell Host Microbe. 439-49 (2009)); or MAVS/VISA/IPS-1/Gardif, which interacts with RIG-1 to initiate an antiviral signaling cascade (Cui et al., 29 Mol. Cell. 169-79 (2008)); Kawai et al., 6 Nat. Immunol. 981-88 (2005)).

[0194] For optimal production of an immunogenic agent in cell-based bioprocesses described herein, it is desirable to maximize cell viability. Accordingly, in one embodiment, production of an immunogenic is enhanced by modulating expression of an avian cell protein that affects apoptosis or cell viability, such as Bax; Bak ((BCL2-antagonist/killer 1) Gene ID: 419912; LDHA (lactate dehydrogenase A), Gene ID: 396221; LDHB, Gene ID: 373997; BIK; BAD; BIM; HRK; BCLG; HR; NOXA; PUMA; BOK (BCL2-related ovarian killer), Gene ID: 395445; BOO; BCLB; CASP2 (apoptosis-related cysteine peptidase (neural precursor cell expressed, developmentally down-regulated 2)), Gene ID: 395857; CASP3 (apoptosis-related cysteine peptidase), Gene ID: 395476; CASP6, Gene ID: 395477; CASP7, Gene ID: 423901; CASP8, Gene ID: 395284; CASP9, Gene ID: 426970; CASP10, Gene ID: 424081; BCL2 (B-cell CLL/lymphoma 2), Gene ID: 396282; p53, Gene ID: 396200; APAF1; HSP70, Gene ID: 423504; TRAIL (TRAIL-LIKE TNF-related apoptosis inducing ligand-like), Gene ID: 395283; BCL2L1 (BCL2-like 1), Gene ID: 373954; BCL2L13 (BCL2-like 13 (apoptosis facilitator)), Gene ID: 418163; BCL2L14 (BCL2-like 14 (apoptosis facilitator)), Gene ID: 419096; FASLG (Fas ligand (TNF superfamily, member 6)), Gene ID: 429064; DPF2 (D4, zinc and double PHD fingers family 2), Gene ID: 429064; AIFM2 (apoptosis-inducing factor mitochondrion-associated 2), Gene ID: 423720; AIFM3, Gene ID: 416999; STK17A (serine/threonine kinase 17a (apoptosis-inducing)), Gene ID: 420775; APITD1 (apoptosis-inducing, TAF9-like domain 1), Gene ID: 771417; SIVA1 (apoptosis-inducing factor), Gene ID: 423493; FAS (TNF receptor superfamily member 6), Gene ID: 395274; TGFβ2 (transforming growth factor beta 2), Gene ID: 421352; TGFBR1 (transforming growth factor, beta receptor I), Gene ID: 374094; LOC378902 (death domain-containing tumor necrosis factor receptor superfamily member 23), Gene ID: 378902; or BCL2A1 (BCL2-related protein A1), Gene ID: 395673. For example, the BAK protein is known to down-regulate cell apoptosis pathways. Suyama et al., S1 Nucl. Acids. Res. 207-08 (2001). A particular embodiment thus provides for a RNA effector molecule that targets the BAK1 gene.

[0195] The production of an immunogenic agent in cell-based bioprocesses described herein may also be optimized by targeting genes that have been identified through screens. These include, for example, avian genes PUSL1 (pseudouridylate synthase-like 1) (Brass et al., 139 Cell 1243-54 (2009)); TPST1 (tyrosylprotein sulfotransferase 1), Gene ID: 417546 (id.); WDR33 (WD repeat domain 33) Gene ID 424753 (id.); Nod2 (Sabbah et al., 10 Nat. Immunol. 1973-80 (2009)); MCT4 (solute carrier family 16, member 3 (monocarboxylic acid transporter 4)), Gene ID: 395383 (Krishnan et al., (2008)); ACRC (acidic repeat containing) Gene ID: 422202 (id.); AMELY (id.); ATCAY (cerebellar, Cayman type (caytaxin)), Gene ID: 420094 (id); ANP32B (acidic (leucine-rich) nuclear phosphoprotein 32 family member), Gene ID: 420087(id); DEFA3 (id); DHRS10 (id); DOCK4 (dedicator of cytokinesis 4), Gene ID: 417779 (id); FAM106A (id); FKBP1B (FK506 binding protein 1B), Gene ID: 395254 (id); IRF3 (id); KBTBD8 (kelch repeat and BTB (POZ) domain containing 8), Gene ID: 416085 (id); KIAA0753 (homolog of KIAA0753 gene), Gene ID: 417681(id); LPGAT1 (lysophosphatidylglycerol acyltransferase 1), Gene ID: 421375 (id); MSMB (microseminoprotein, beta), Gene ID: 423773 (id); NFS1 (nitrogen fixation 1 homolog), Gene ID 419133 (id); NPIP (id); NPM3 (nucleophosmin/nucleoplasmin 3), Gene ID: 770430 (id); SCGB2A1 (id); SERPINB7 (id); SLC16A4 (solute carrier family 16, member 4 (monocarboxylic acid transporter 5)), Gene ID: 419809 (id); SPTBN4 (spectrin, beta, non-erythrocytic 4), Gene ID: 430775 (id); or TMEM146 (id).

[0196] Other target genes that may be affected to optimize immunogenic agents include genes associated with cell cycle and/or cell proliferation, such as avian cell CDKN1B (cyclin-dependent kinase inhibitor 1B, p27, kip1), Gene ID: 374106, a targert for which a siRNA against p27kip1 induces proliferation (Kikuchi et al. 47 Invest. Opthalmol. 4803-09 (2006)); or FOX01, a target for which a siRNA induces aortic endothelial cell proliferation (Fosbrink et al., J. Biol. Chem. 19009-18 (2006).

[0197] In some embodiments, for example when an immunogenic agent is viral, such as an influenza virus, target genes are those involved in reducing sialic acid from the host cell surface, which reduces virus binding, and therefore increases recovery of the virus in cell culture media (i.e., less virus remains stuck on cell membranes). These targets include: solute carrier family 35 (CMP-sialic acid transporter) member A1 (SLC35A1), CHO inferred from mouse GeneID:24060, avian target gene in Table 8; solute carrier family 35 (UDP-galactose transporter), member A2 (SLC35A2), CHO inferred from mouse GeneID:22232; UDP-N-acetylglucosamine 2-epimerase/N-acetylmannosamine kinase (GNE), CHO inferred from mouse GeneID:10090, avian target gene in Table 7; cytidine monophospho-N-acetylneuraminic acid synthetase (Cmas), CHO inferred from mouse Gene ID:12764, avian target gene in Table 6; UDP-Gal:betaGlcNAc beta 1,4-galactosyltransferase (B4GalT1), CHO inferred from mouse GeneID:14595, avian target gene in Table 4; and UDP-Gal:betaGlcNAc beta 1,4-galactosyltransferase, polypeptide 6 (B4GalT6), CHO inferred from mouse GeneID:56386,

[0198] Additional targets may include those involved in host sialidase in avian cells (see Wang et al., 10 BMC Genomics 512 (2009)), because influenzae binds to cell surface sialic acid residues, thus decreased sialidase may increase the rate of infection or purification: NEU2 sialidase 2 (cytosolic sialidase) Gene ID: 430542; NEU3 sialidase 3 (membrane sialidase) Gene ID: 68823. Additional target genes include miRNA antagonists that may be used to determine if this is the basis of some viruses not growing well in cells, for example Dicer (dicer 1, ribonuclease type III) because knock-down of Dicer leads to a modest increase in the rate of infection (Matskevich et al., 88 J. Gen. Virol. 2627-35 (2007)); or ISRE (interferon-stimulated response element), as a decoy titrate TFs away from ISRE-containing promoters.

[0199] Additionally, a plurality of different RNA effector molecules are introduced into the cell and permit modulation of one or more target genes. In one embodiment, the RNA effector molecules are administered during production of the viral product. In another embodiment, a plurality of different RNA effector molecules is contacted with the cells to permit modulation of PTEN, CDKN2A, BAK1, FN1, LDHA, IFN, or IFNAR1 gene expression. The effector molecules may be co-administered during the virus production and can optionally contains an additional gene or agent.

[0200] When a plurality of different RNA effector molecules are used to modulate expression of one or more target genes the plurality of RNA effector molecules are contacted with cells simultaneously or separately. In addition, each RNA effector molecule can have its own dosage regime. For example, one may prepare a composition comprising a plurality of RNA effector molecules are contacted with a cell. Alternatively, one may administer one RNA effector molecule at a time to the cell culture. In this manner, one can easily tailor the average percent inhibition desired for each target gene by altering the frequency of administration of a particular RNA effector molecule. For example, full inhibition (i.e., >80%) of lactate dehydrogenase (LDH) is not always necessary to significantly improve production of a viral product and under some conditions may be detrimental to cell viability. Thus, one may desire to contact a cell with an RNA effector molecule targeting LDH at a lower frequency (e.g., less often) or at a lower dosage (e.g., lower multiples over the IC₅₀) than the dosage for other RNA effector molecules. Contacting a cell with each RNA effector molecule separately can also prevent interactions between RNA effector molecules that can reduce efficiency of target gene modulation. For ease of use and to prevent potential contamination it may be preferred to administer a cocktail of different RNA effector molecules, thereby reducing the number of doses required and minimizing the chance of introducing a contaminant to the cell or cell culture.

[0201] Reactive oxygen species (ROS) are toxic to host cells and can mediate non-specific oxidation, degradation and/or cleavage and other structural modifications of the immunogenic agent that lead to increased heterogeneity, decreased biological activity, lower recoveries, and/or other impairments to of biological products produced by methods provided herein. Accordingly, production of an immunogenic agent is enhanced by modulating expression of a pro-oxidant enzyme, such as a protein selected from the group consisting of: NAD(p)H oxidase, peroxidase, myeloperoxidase, constitutive neuronal nitric oxide synthase (cnNOS), xanthine oxidase (XO) and myeloperoxidase (MPO), 15-lipoxygenase-1, NADPH cytochrome c reductase, NAPH cytochrome c reductase, NADH cytochrome b5 reductase, and cytochrome P4502E1.

[0202] Additionally, immunogenic protein production can be enhanced by modulating expression of a protein that affects the cell cycle of host cells, such as a cyclin (e.g., CDC2) or a cyclin dependent kinase (CDK). For example, the cyclin dependent kinase may be CDK2, CDK4, P10, P21, P27, p53, P57, p16INK4a, P14ARF, and CDK4. Thus, for example, the expression of one or more proteins that affect cell cycle progression can be transiently modulated during the growth and/or production phases of viral protein production in order to enhance expression and recovery of viral products. A particular embodiment provides for a RNA effector molecule that targets the CDKN1 gene.

[0203] It is known that production of lactic acid in cell cultures inhibits cell growth and influences metabolic pathways involved in glycolysis and glutaminolysis (Lao & Toth, 13 Biotech. Prog., 688-91 (1997)). The accumulation of lactate in cells is caused mainly by the incomplete oxidation of glucose to CO₂ and H₂O, in which most of the glucose is oxidized to pyruvate and finally converted to lactate by lactate dehydrogenase (LDH). The accumulation of lactic acid in cells is detrimental to achieving high cell density and viability. Accordingly, in one embodiment, immunogenic protein production is enhanced by modulating expression of a protein that affects lactate formation, such as lactate dehydrogenase A (LDHA). Hence, a particular embodiment provides for a RNA effector molecule that targets the LDHA1 gene.

[0204] In one embodiment, a cell culture is treated as described herein with RNA effector molecules that permit modulation of Bak and LDH expression. In another embodiment, the RNA effector molecules targeting Bak and LDH may be administered in combination with one or more additional RNA effector molecules and/or agents. Provided herein is a cocktail of RNA effector molecules targeting Bak and LDH expression, which can optionally be combined with additional RNA effector molecules or other bioactive agents as described herein.

[0205] In some embodiments, production of an immunogenic agent is enhanced by modulating expression of a protein that affects cellular pH, such as LDH or lysosomal V-type ATPase.

[0206] In some embodiments, production of an immunogenic agent is enhanced by modulating expression of a protein that affects carbon metabolism or transport, such as GLUT1, GLUT2, GLUT3, GLUT4, PTEN, or LDH.

[0207] In some embodiments, production of an immunogenic agent is enhanced by modulating expression of a protein that affects uptake or efficacy of an RNA effector molecule in host cells, such as ApoE, Mannose/Gal NAc-receptor, and Eril. In various embodiments, the expression of one or more proteins that affects RNAi uptake or efficacy in cells is modulated according to a method provided herein concurrently with modulation of one or more additional target genes, such as a target gene described herein, in order to enhance the degree and/or extent of modulation of the one or more additional target genes.

[0208] As used herein, a “RNA effector composition” includes an effective amount of a RNA effector molecule and an acceptable carrier. As used herein, “effective amount” refers to that amount of a RNA effector molecule effective to produce an effect on a bioprocess for the production of an immunogenic agent. In one embodiment, the RNA effector composition comprises a reagent that facilitates RNA effector molecule uptake (e.g., a transfection reagent).

[0209] The term “acceptable carrier” refers to a carrier for administration of a RNA effector molecule to cultured cells. Such carriers include, but are not limited to, saline, buffered saline, dextrose, water, glycerol, ethanol, and combinations thereof.

[0210] In some embodiments, RNA effector compositions include two or more RNA effector molecules, e.g., comprise two, three, four or more RNA effector molecules. In various embodiments, the two or more RNA effector molecules are capable of modulating expression of the same target gene and/or one or more additional target genes. Advantageously, certain compositions comprising multiple RNA effector molecules are more effective in enhancing production of an immunogenic agent, or one or more aspects of such production, than separate compositions comprising the individual RNA effector molecules.

[0211] A composition can comprise one or more RNA effector molecules capable of modulating expression of one or multiple genes relating to a common biological process or property of the cell, for example the interferon signaling pathway including IFN, STAT proteins or other proteins in the JAK-STAT signaling pathway, IFNRA1 and/or IFNRA2. For example, viral infection results in swift innate response in infected cells against potential lytic infection, transformation and/or apoptosis, which is characterized by the production of IFNα and IFNβ. This signaling results in activation of IFN-stimulates genes (ISGs) that mediate the effects of OFN. IFN regulatory factor (IRFs) are family of nine cellular factors that bind to consensus IFN-stimulated response elements (ISREs) and induce other ISGs. See Kirshner et al., 79 J. Virol. 9320-24 (2005). The IFNs increase the expression of intrinsic proteins including TRIM5α, Fv, Mx, eIF2α and 2′-5′ OAS, and induce apoptosis of virus-infected cells and cellular resistance to viral infection. Koyam et al., 43 Cytokine 336-41 (2008). Hence, a particular embodiment provides for a RNA effector molecule that targets a IFNR1 gene. Other embodiments target one or more genes in the IFN signaling pathway.

[0212] Inhibition of IFN signaling responses may be determined by measuring the phosphorylated state of components of the IFN pathway following viral infection, e.g., IRF-3, which is phosphorylated in response to viral dsRNA. In response to type I IFN, Jak1 kinase and TyK2 kinase, subunits of the IFN receptor, STAT1, and STAT2 are rapidly tyrosine phosphorylated. Thus, in order to determine whether the RNA effector molecule inhibits IFN responses, cells may be contacted with the RNA effector molecule, and following viral infection, the cells are lysed. IFN pathway components, such as Jak1 kinase or TyK2 kinase, are immunoprecipitated from the infected cell lysates, using specific polyclonal sera or antibodies, and the tyrosine phosphorylated state of the kinase determined by immunoblot assays with an anti-phosphotyrosine antibody. See, e.g., Krishnan et al., 247 Eur. J. Biochem. 298-305 (1997). A decreased phosphorylated state of any of the components of the IFN pathway following infection with the virus indicates decreased IFN responses by the virus in response to the RNA effector molecule(s).

[0213] Efficacy of IFN signaling inhibition can also be determined by measuring the ability to bind specific DNA sequences or the translocation of transcription factors induced in response to viral infection, and RNA effector molecule treatment, e.g., targeting IRF3, STAT1, STAT2, etc. In particular, STAT1 and STAT2 are phosphorylated and translocated from the cytoplasm to the nucleus in response to type I IFN. The ability to bind specific DNA sequences or the translocation of transcription factors can be measured by techniques known to skilled artisan, e.g., electromobility gel shift assays, cell staining, etc. Another approach to measuring inhibition of IFN induction determines whether an extract from the cell culture producing the desired viral product and contacted with a RNA effector molecule is capable of conferring protective activity against viral infection. More specifically, for example, cells are infected with the desired virus and contacted with a RNA effector. Approximately 15 to 20 hours post-infection, the cells or cell media are harvested and assayed for viral titer, or by quantitative product-enhanced reverse transcriptase (PERT) assay, immune assays, or in vivo challenge.

[0214] Described herein are RNA effector molecules that modulate expression of a target gene. In one embodiment, the RNA effector molecule agent includes double-stranded ribonucleic acid (dsRNA) molecules for inhibiting the expression of a target gene in a cell, where the dsRNA includes an antisense strand having a region of complementarity which is complementary to at least a part of a target gene formed in the expression of a target gene, and where the region of complementarity is 30 nucleotides or less in length, generally 19 to 24 nucleotides in length, and where the dsRNA, upon contact with an cell expressing the target gene, inhibits the expression of the target gene by at least 10% as assayed by, for example, a PCR, PERT or branched DNA (bDNA)-based method, or by a protein-based method, such as by Western blot. Expression of a target gene in an cell can be assayed by measuring target gene mRNA levels, e.g., by PERT, bDNA or TAQMAN® gene expression assay, or by measuring protein levels, e.g., by immunofluorescence analysis.

[0215] A dsRNA includes two RNA strands that are sufficiently complementary to hybridize to form a duplex structure under conditions in which the dsRNA will be used. One strand of a dsRNA (the antisense strand) includes a region of complementarity that is substantially complementary, and generally fully complementary, to a target sequence, derived, for example, from the sequence of an mRNA formed during the expression of a target gene. The other strand (the sense strand) includes a region that is complementary to the antisense strand, such that the two strands hybridize and form a duplex structure when combined under suitable conditions. Generally, the duplex structure is between 10 and 30 inclusive, more generally between 18 and 25 inclusive, yet more generally between 19 and 24 inclusive, and most generally between 19 and 21 base pairs in length, inclusive. Similarly, the region of complementarity to the target sequence is between 10 and 30 inclusive, more generally between 18 and 25 inclusive, yet more generally between 19 and 24 inclusive, and most generally between 19 and 21 nucleotides in length, inclusive. In some embodiments, the dsRNA is between 10 and 20 nucleotides in length, inclusive, and in other embodiments, the dsRNA is between 25 and 30 nucleotides in length, inclusive. As the ordinarily skilled person will recognize, the targeted region of an RNA targeted for cleavage will most often be part of a larger RNA molecule, often a mRNA molecule. Where relevant, a “part” of a mRNA target is a contiguous sequence of a mRNA target of sufficient length to be a substrate for RNAi-directed cleavage (i.e., cleavage through a RISC pathway). dsRNAs having duplexes as short as 9 base pairs can, under some circumstances, mediate RNAi-directed RNA cleavage. Most often a target will be at least 10 nucleotides in length, such as 15 to 30 nucleotides in length.

[0216] One of skill in the art will also recognize that the duplex region is a primary functional portion of a dsRNA, e.g., a duplex region of 9 to 36, e.g., 15 to 30 base pairs. Thus, in one embodiment, to the extent that it becomes processed to a functional duplex of e.g., 15 to 30 base pairs that targets a desired RNA for cleavage, an RNA molecule or complex of RNA molecules having a duplex region greater than 30 base pairs is a dsRNA. Thus, an ordinarily skilled artisan will recognize that in one embodiment, then, an RNA effector molecule is a dsRNA.

[0217] A dsRNA as described herein can further include one or more single-stranded nucleotide overhangs. The dsRNA can be synthesized by standard methods known in the art as further discussed below, e.g., by use of an automated DNA synthesizer, such as are commercially available from, for example, Biosearch Technologies (Novato, Calif.). In one embodiment, a target gene is a human target gene. In specific embodiments, the first sequence is a sense strand of a dsRNA that includes a sense sequence and the second sequence is a strand of a ds RNA that includes an antisense sequence. Alternative dsRNA agents that target elsewhere in the target sequence can readily be determined using the target sequence and the flanking target sequence. In this aspect, one of the two sequences is complementary to the other of the two sequences, with one of the sequences being substantially complementary to a sequence of an mRNA generated in the expression of a target gene. As such, in this aspect, a dsRNA will include two oligonucleotides, where one oligonucleotide is described as the sense strand and the second oligonucleotide is described as the antisense strand. As described elsewhere herein and as known in the art, the complementary sequences of a dsRNA can also be contained as self-complementary regions of a single nucleic acid molecule, as opposed to being on separate oligonucleotides.

[0218] The skilled person is well aware that dsRNAs having a duplex structure of between 20 and 23, but specifically 21, base pairs have been hailed as particularly effective in inducing RNA interference. Elbashir et al., 20 EMBO 6877-88 (2001). In the embodiments described above, by virtue of the nature of the oligonucleotide sequences, dsRNAs described herein can include at least one strand of a length of 21 nucloetides. It can be reasonably expected that shorter duplexes having one of the sequences minus only a few nucleotides on one or both ends may be similarly effective as compared to the dsRNAs described in detail. Hence, dsRNAs having a partial sequence of at least 10, 11, 12, 13, 14, 15, 16, 17, 18, 19, 20, or more contiguous nucleotides from a given sequence, and differing in their ability to inhibit the expression of a target gene by not more than 5%, 10%, 15%, 20%, 25%, or 30% inhibition from a dsRNA comprising the full sequence, are contemplated according to the invention.

[0219] In addition, the RNAs provided herein identify a site in a target transcript that is susceptible to RISC-mediated cleavage. As such, the present invention further features RNA effector molecules that target within one of such sequences. As used herein, a RNA effector molecule is said to target within a particular site of a RNA transcript if the RNA effector molecule promotes cleavage of the transcript anywhere within that particular site. Such an RNA effector molecule will generally include at least 10 contiguous nucleotides from one of the sequences provided coupled to additional nucleotide sequences taken from the region contiguous to the selected sequence in a target gene.

[0220] Although a target sequence is generally 10 to 30 nucleotides in length, there is wide variation in the suitability of particular sequences in this range for directing cleavage of any given target RNA. Various software packages and the guidelines set out herein provide guidance for the identification of optimal target sequences for any given gene target, but an empirical approach can also be taken in which a “window” or “mask” of a given size (as a non-limiting example, 21 nucleotides) is literally or figuratively (including, e.g., in silico) placed on the target RNA sequence to identify sequences in the size range that can serve as target sequences. By moving the sequence “window” progressively one nucleotide upstream or downstream of an initial target sequence location, the next potential target sequence can be identified, until the complete set of possible sequences is identified for any given target size selected. This process, coupled with systematic synthesis and testing of the identified sequences (using assays as described herein or as known in the art) to identify those sequences that perform optimally can identify those RNA sequences that, when targeted with a RNA effector molecule agent, mediate the best inhibition of target gene expression. Thus, while the sequences identified, for example, in Tables 2 to 7 represent effective target sequences, it is contemplated that further optimization of inhibition efficiency can be achieved by progressively “walking the window” one nucleotide upstream or downstream of the given sequences to identify sequences with equal or better inhibition characteristics.

[0221] Further, it is contemplated that for any sequence identified, e.g., in Table 2, further optimization could be achieved by systematically either adding or removing nucleotides to generate longer or shorter sequences and testing those and sequences generated by walking a window of the longer or shorter size up or down the target RNA from that point. Again, coupling this approach to generating new candidate targets with testing for effectiveness of RNA effector molecules based on those target sequences in an inhibition assay as known in the art or as described herein can lead to further improvements in the efficiency of inhibition. Further still, such optimized sequences can be adjusted by, e.g., the introduction of modified nucleotides as described herein or as known in the art, addition or changes in overhang, or other modifications as known in the art and/or discussed herein to further optimize the molecule (e.g., increasing serum stability or circulating half-life, increasing thermal stability, enhancing transmembrane delivery, targeting to a particular location or cell type, increasing interaction with silencing pathway enzymes, increasing release from endosomes, etc.) as an expression inhibitor.

[0222] A RNA effector molecule as described herein can contain one or more mismatches to the target sequence. For example, a RNA effector molecule as described herein contains no more than three mismatches. If the antisense strand of the RNA effector molecule contains mismatches to a target sequence, it is preferable that the area of mismatch not be located in the center of the region of complementarity. If the antisense strand of the RNA effector molecule contains mismatches to the target sequence, it is preferable that the mismatch be restricted to be within the last 5 nucleotides from either the 5′ or 3′ end of the region of complementarity. For example, for a 23-nucleotide RNA effector molecule agent RNA strand which is complementary to a region of a target gene, the RNA strand generally does not contain any mismatch within the central 13 nucleotides. The methods described herein, or methods known in the art, can be used to determine whether a RNA effector molecule containing a mismatch to a target sequence is effective in inhibiting the expression of a target gene. Consideration of the efficacy of RNA effector molecules with mismatches in inhibiting expression of a target gene is important, especially if the particular region of complementarity in a target gene is known to have polymorphic sequence variation within the population.

[0223] In one embodiment, at least one end of a dsRNA has a single-stranded nucleotide overhang of 1 to 4, generally 1 or 2 nucleotides. dsRNAs having at least one nucleotide overhang have unexpectedly superior inhibitory properties relative to their blunt-ended counterparts. Moreover, the present inventors have discovered that the presence of a nucleotide overhang on only one strand, at one end of a dsRNA, strengthens the interference activity of the dsRNA, without affecting its overall stability. Such an overhang need not be a single nucleotide overhang; a dinucleotide overhang can also be present.

[0224] In yet another embodiment, an oligonucleotide (e.g., a RNA effector molecule) is chemically modified to enhance stability or other beneficial characteristics. Oligonucleotides can be modified to prevent rapid degradation of the oligonucleotides by endo- and exo-nucleases and avoid undesirable off-target effects. The nucleic acids featured in the invention can be synthesized and/or modified by methods well established in the art, such as those described in CURRENT PROTOCOLS IN NUCLEIC ACID CHEMISTRY (Beaucage et al., eds., John Wiley & Sons, Inc., NY). Modifications include, for example, (a) end modifications, e.g., 5′ end modifications (phosphorylation, conjugation, inverted linkages, etc.), or 3′ end modifications (conjugation, DNA nucleotides, inverted linkages, etc.); (b) base modifications, e.g., replacement with stabilizing bases, destabilizing bases, or bases that base pair with an expanded repertoire of partners, removal of bases (abasic nucleotides), or conjugated bases; (c) sugar modifications (e.g., at the 2′ position or 4′ position) or replacement of the sugar; as well as (d) internucleoside linkage modifications, including modification or replacement of the phosphodiester linkages. Specific examples of oligonucleotide compounds useful in this invention include, but are not limited to RNAs containing modified backbones or no natural internucleoside linkages. RNAs having modified backbones include, among others, those that do not have a phosphorus atom in the backbone. Specific examples of oligonucleotide compounds useful in this invention include, but are not limited to oligonucleotides containing modified or non-natural internucleoside linkages. Oligonucleotides having modified internucloside linkages include, among others, those that do not have a phosphorus atom in the internucleoside linkage. For the purposes of this specification, and as sometimes referenced in the art, modified oligonucleotides that do not have a phosphorus atom in their internucleoside linkage(s) can also be considered to be oligonucleosides. In particular embodiments, the modified oligonucleotides will have a phosphorus atom in its internucleoside linkage(s). For the purposes of this specification, and as sometimes referenced in the art, modified RNAs that do not have a phosphorus atom in their internucleoside backbone can also be considered to be oligonucleosides. In particular embodiments, the modified RNA will have a phosphorus atom in its internucleoside backbone.

[0225] Modified internucleoside linkages include (e.g., RNA backbones) include, for example, phosphorothioates, chiral phosphorothioates, phosphorodithioates, phosphotriesters, aminoalkylphosphotriesters, methyl and other alkyl phosphonates including 3′-alkylene phosphonates and chiral phosphonates, phosphinates, phosphoramidates including 3′-amino phosphoramidate and aminoalkylphosphoramidates, thionophosphoramidates, thionoalkylphosphonates, thionoalkylphosphotriesters, and boranophosphates having normal 3′-5′ linkages, 2′-5′ linked analogs of these, and those) having inverted polarity wherein the adjacent pairs of nucleoside units are linked 3′-5′ to 5′-3′ or 2′-5′ to 5′-2′. Various salts, mixed salts and free acid forms are also included.

[0226] Representative patents that teach the preparation of the above phosphorus-containing linkages include, but are not limited to, U.S. Pat. No. 3,687,808; U.S. Pat. No. 4,469,863; U.S. Pat. No. 4,476,301; U.S. Pat. No. 5,023,243; U.S. Pat. No. 5,177,195; U.S. Pat. No. 5,188,897; U.S. Pat. No. 5,264,423; U.S. Pat. No. 5,276,019; U.S. Pat. No. 5,278,302; U.S. Pat. No. 5,286,717; U.S. Pat. No. 5,321,131; U.S. Pat. No. 5,399,676; U.S. Pat. No. 5,405,939; U.S. Pat. No. 5,453,496; U.S. Pat. No. 5,455,233; U.S. Pat. No. 5,466,677; U.S. Pat. No. 5,476,925; U.S. Pat. No. 5,519,126; U.S. Pat. No. 5,536,821; U.S. Pat. No. 5,541,316; U.S. Pat. No. 5,550,111; U.S. Pat. No. 5,563,253; U.S. Pat. No. 5,571,799; U.S. Pat. No. 5,587,361; U.S. Pat. No. 5,625,050; U.S. Pat. No. 6,028,188; U.S. Pat. No. 6,124,445; U.S. Pat. No. 6,160,109; U.S. Pat. No. 6,169,170; U.S. Pat. No. 6,172,209; U.S. Pat. No. 6,239,265; U.S. Pat. No. 6,277,603; U.S. Pat. No. 6,326,199; U.S. Pat. No. 6,346,614; U.S. Pat. No. 6,444,423; U.S. Pat. No. 6,531,590; U.S. Pat. No. 6,534,639; U.S. Pat. No. 6,608,035; U.S. Pat. No. 6,683,167; U.S. Pat. No. 6,858,715; U.S. Pat. No. 6,867,294; U.S. Pat. No. 6,878,805; U.S. Pat. No. 7,015,315; U.S. Pat. No. 7,041,816; U.S. Pat. No. 7,273,933; U.S. Pat. No. 7,321,029; and No. RE39464.

[0227] Modified oligonucleotide internucleoside linakges (e.g., RNA backbones) that do not include a phosphorus atom therein have internucleoside linkages that are formed by short chain alkyl or cycloalkyl internucleoside linkages, mixed heteroatoms and alkyl or cycloalkyl internucleoside linkages, or one or more short chain heteroatomic or heterocyclic internucleoside linkages. These include those having morpholino linkages (formed in part from the sugar portion of a nucleoside); siloxane backbones; sulfide, sulfoxide and sulfone backbones; formacetyl and thioformacetyl backbones; methylene formacetyl and thioformacetyl backbones; alkene containing backbones; sulfamate backbones; methyleneimino and methylenehydrazino backbones; sulfonate and sulfonamide backbones; amide backbones; and others having mixed N, O, S and CH₂ component parts.

[0228] Representative patents that teach the preparation of the above oligonucleosides include, but are not limited to, U.S. Pat. No. 5,034,506; U.S. Pat. No. 5,166,315; U.S. Pat. No. 5,185,444; U.S. Pat. No. 5,214,134; U.S. Pat. No. 5,216,141; U.S. Pat. No. 5,235,033; U.S. Pat. No. 5,64,562; U.S. Pat. No. 5,264,564; U.S. Pat. No. 5,405,938; U.S. Pat. No. 5,434,257; U.S. Pat. No. 5,466,677; U.S. Pat. No. 5,470,967; U.S. Pat. No. 5,489,677; U.S. Pat. No. 5,541,307; U.S. Pat. No. 5,561,225; U.S. Pat. No. 5,596,086; U.S. Pat. No. 5,602,240; U.S. Pat. No. 5,608,046; U.S. Pat. No. 5,610,289; U.S. Pat. No. 5,618,704; U.S. Pat. No. 5,623,070; U.S. Pat. No. 5,663,312; U.S. Pat. No. 5,633,360; U.S. Pat. No. 5,677,437; and U.S. Pat. No. 5,677,439.

[0229] In other modified oligonucleotides suitable or contemplated for use in RNA effector molecules, both the sugar and the internucleoside linkage, i.e., the backbone, of the nucleotide units are replaced with novel groups. The base units are maintained for hybridization with an appropriate nucleic acid target compound. One such oligomeric compound, an RNA mimetic that has been shown to have excellent hybridization properties, is referred to as a peptide nucleic acid (PNA). In PNA compounds, the sugar backbone of an RNA is replaced with an amide containing backbone, in particular an aminoethylglycine backbone. The nucleobases are retained and are bound directly or indirectly to aza nitrogen atoms of the amide portion of the backbone. Representative patents that teach the preparation of PNA compounds include, but are not limited to, U.S. Pat. No. 5,539,082; U.S. Pat. No. 5,714,331; and U.S. Pat. No. 5,719,262. Further teaching of PNA compounds can be found, for example, in Nielsen et al., 254 Science 1497-1500 (1991).

[0230] Some embodiments featured in the invention include oligonucleotides with phosphorothioate internucleoside linkages and oligonucleosides with heteroatom backbones, and in particular —CH₂—NH—CH₂—, —CH₂—N(CH₃)—O—CH₂— [known as a methylene (methylimino) or MMI backbone], —CH₂—O—N(CH₃)—CH₂—, —CH₂—N(CH₃)—N(CH₃)—CH₂— and —N(CH₃)—CH₂—CH₂-[wherein the native phosphodiester internucleoside linkage is represented as —O—P—O—CH₂—] (see U.S. Pat. No. 5,489,677), and amide backbones (see U.S. Pat. No. 5,602,240). In some embodiments, the oligonucleotides featured herein have morpholino backbone structures (see U.S. Pat. No. 5,034,506).

[0231] Modified oligonucleotides can also contain one or more substituted sugar moieties. The RNA effector molecules, e.g., dsRNAs, featured herein can include one of the following at the 2′ position: H (deoxyribose); OH (ribose); F; O-, S-, or N-alkyl; O-, S-, or N-alkenyl; O-, S- or N-alkynyl; or O-alkyl-O-alkyl, wherein the alkyl, alkenyl and alkynyl can be substituted or unsubstituted C₁ to C₁₀ alkyl or C₂ to C₁₀ alkenyl and alkynyl. Exemplary suitable modifications include O[(CH₂)ₙO]ₘCH₃, O(CH₂).ₙNH₃, O(CH₂)ₙNH₂, O(CH₂)ₙCH₃, O(CH₂)ₙONH₂, and O(CH₂)ₙON[(CH₂)ₙCH₃)]₂, where n and m are from 1 to 10, inclusive. In some embodiments, oligonucleotides include one of the following at the 2′ position: C₁ to C₁₀ lower alkyl, substituted lower alkyl, alkaryl, aralkyl, O-alkaryl or O-aralkyl, SH, SCH₃, OCN, Cl, Br, CN, CF₃, OCF₃, SOCH₃, SO₂CH₃, ONO₂, NO₂, N₃, NH₂, heterocycloalkyl, heterocycloalkaryl, aminoalkylamino, polyalkylamino, substituted silyl, an RNA cleaving group, a reporter group, an intercalator, a group for improving the pharmacokinetic properties of an oligonucleotide (e.g., a RNA effector molecule), or a group for improving the pharmacodynamic properties of an oligonucleotide (e.g., a RNA effector molecule), and other substituents having similar properties. In some embodiments, the modification includes a 2′-methoxyethoxy (2′-O—CH₂CH₂OCH₃, also known as 2′-O-(2-methoxyethyl) or 2′-MOE) (Martin et al., 78 Helv. Chim. Acta 486-504 (1995)), i.e., an alkoxy-alkoxy group. Another exemplary modification is 2′-dimethylaminooxyethoxy, i.e., a O(CH₂)₂ON(CH₃)₂ group, also known as 2′-DMAOE, as described in examples herein below, and 2′-dimethylaminoethoxyethoxy (also known in the art as 2′-O-dimethylaminoethoxyethyl or 2′-DMAEOE), i.e., 2′-O—CH₂—O—CH₂—N(CH₂)₂.

[0232] Other modifications include 2′-methoxy (2′-OCH₃), 2′-aminopropoxy (2′-OCH₂CH₂CH₂NH₂) and 2′-fluoro (2′-F). Similar modifications can also be made at other positions on the oligonucleotide, particularly the 3′ position of the sugar on the 3′ terminal nucleotide or in 2′-5′ linked oligonucleotide and the 5′ position of 5′ terminal nucleotide. Oligonucletodides can also have sugar mimetics such as cyclobutyl moieties in place of the pentofuranosyl sugar. Representative patents that teach the preparation of such modified sugar structures include, but are not limited to, U.S. Pat. No. 4,981,957; U.S. Pat. No. 5,118,800; No. 5,319,080; U.S. Pat. No. 5,359,044; U.S. Pat. No. 5,393,878; U.S. Pat. No. 5,446,137; U.S. Pat. No. 5,466,786; U.S. Pat. No. 5,514,785; No. 5,519,134; U.S. Pat. No. 5,567,811; U.S. Pat. No. 5,576,427; U.S. Pat. No. 5,591,722; U.S. Pat. No. 5,597,909; U.S. Pat. No. 5,610,300; No. 5,627,053; U.S. Pat. No. 5,639,873; U.S. Pat. No. 5,646,265; U.S. Pat. No. 5,658,873; U.S. Pat. No. 5,670,633; and U.S. Pat. No. 5,700,920, certain of which are commonly owned with the instant application.

[0233] An oligonucleotide (e.g., a RNA effector molecule) can also include nucleobase (often referred to in the art simply as “base”) modifications or substitutions. As used herein, “unmodified” or “natural” nucleobases include the purine bases adenine (A) and guanine (G), and the pyrimidine bases cytosine (C) and uracil (U). Modified nucleobases include other synthetic and natural nucleobases such as inosine, xanthine, hypoxanthine, nubularine, isoguanisine, tubercidine, 2-(halo)adenine, 2-(alkyl)adenine, 2-(propyl)adenine, 2 (amino)adenine, 2-(aminoalkyll)adenine, 2 (aminopropyl)adenine, 2 (methylthio) N6 (isopentenyl)adenine, 6 (alkyl)adenine, 6 (methyl)adenine, 7 (deaza)adenine, 8 (alkenyl)adenine, 8-(alkyl)adenine, 8 (alkynyl)adenine, 8 (amino)adenine, 8-(halo)adenine, 8-(hydroxyl)adenine, 8 (thioalkyl)adenine, 8-(thiol)adenine, N6-(isopentyl)adenine, N6 (methyl)adenine, N6, N6 (dimethyl)adenine, 2-(alkyl)guanine, 2 (propyl)guanine, 6-(alkyl)guanine, 6 (methyl)guanine, 7 (alkyl)guanine, 7 (methyl)guanine, 7 (deaza)guanine, 8 (alkyl)guanine, 8-(alkenyl)guanine, 8 (alkynyl)guanine, 8-(amino)guanine, 8 (halo)guanine, 8-(hydroxyl)guanine, 8 (thioalkyl)guanine, 8-(thiol)guanine, N (methyl)guanine, 2-(thio)cytosine, 3 (deaza) 5 (aza)cytosine, 3-(alkyl)cytosine, 3 (methyl)cytosine, 5-(alkyl)cytosine, 5-(alkynyl)cytosine, 5 (halo)cytosine, 5 (methyl)cytosine, 5 (propynyl)cytosine, 5 (propynyl)cytosine, 5 (trifluoromethyl)cytosine, 6-(azo)cytosine, N4 (acetyl)cytosine, 3 (3 amino-3 carboxypropyl)uracil, 2-(thio)uracil, 5 (methyl) 2 (thio)uracil, 5 (methylaminomethyl)-2 (thio)uracil, 4-(thio)uracil, 5 (methyl) 4 (thio)uracil, 5 (methylaminomethyl)-4 (thio)uracil, (methyl) 2,4 (dithio)uracil, 5 (methylaminomethyl)-2,4 (dithio)uracil, 5 (2-aminopropyl)uracil, 5-(alkyl)uracil, 5-(alkynyl)uracil, 5-(allylamino)uracil, 5 (aminoallyl)uracil, 5 (aminoalkyl)uracil, 5 (guanidiniumalkyl)uracil, 5 (1,3-diazole-1-alkyl)uracil, 5-(cyanoalkyl)uracil, 5-(dialkylaminoalkyl)uracil, 5 (dimethylaminoalkyl)uracil, 5-(halo)uracil, 5-(methoxy)uracil, uracil-5 oxyacetic acid, 5 (methoxycarbonylmethyl)-2-(thio)uracil, 5 (methoxycarbonyl-methyl)uracil, 5 (propynyl)uracil, 5 (propynyl)uracil, 5 (trifluoromethyl)uracil, 6 (azo)uracil, dihydrouracil, N3 (methyl)uracil, 5-uracil (i.e., pseudouracil), 2 (thio)pseudouracil,4 (thio)pseudouracil,2,4-(dithio)psuedouracil,5-(alkyl)pseudouracil, 5-(methyl)pseudouracil, 5-(alkyl)-2-(thio)pseudouracil, 5-(methyl)-2-(thio)pseudouracil, 5-(alkyl)-4 (thio)pseudouracil, 5-(methyl)-4 (thio)pseudouracil, 5-(alkyl)-2,4 (dithio)pseudouracil, 5-(methyl)-2,4 (dithio)pseudouracil, 1 substituted pseudouracil, 1 substituted 2(thio)-pseudouracil, 1 substituted 4 (thio)pseudouracil, 1 substituted 2,4-(dithio)pseudouracil, 1 (aminocarbonylethylenyl)-pseudouracil, 1 (aminocarbonylethylenyl)-2(thio)-pseudouracil, 1 (aminocarbonylethylenyl)-4 (thio)pseudouracil, 1 (aminocarbonylethylenyl)-2,4-(dithio)pseudouracil, 1 (aminoalkylaminocarbonylethylenyl)-pseudouracil, 1 (aminoalkylamino-carbonylethylenyl)-2(thio)-pseudouracil, 1 (aminoalkylamino-carbonylethylenyl)-4 (thio)pseudouracil, 1 (aminoalkylaminocarbonylethylenyl)-2,4-(dithio)pseudouracil, 1,3-(diaza)-2-(oxo)-phenoxazin-1-yl, 1-(aza)-2-(thio)-3-(aza)-phenoxazin-1-yl, 1,3-(diaza)-2-(oxo)-phenthiazin-1-yl, 1-(aza)-2-(thio)-3-(aza)-phenthiazin-1-yl, 7-substituted 1,3-(diaza)-2-(oxo)-phenoxazin-1-yl, 7-substituted 1-(aza)-2-(thio)-3-(aza)-phenoxazin-1-yl, 7-substituted 1,3-(diaza)-2-(oxo)-phenthiazin-1-yl, 7-substituted 1-(aza)-2-(thio)-3-(aza)-phenthiazin-1-yl, 7-(aminoalkylhydroxy)-1,3-(diaza)-2-(oxo)-phenoxazin-1-yl, 7-(aminoalkylhydroxy)-1-(aza)-2-(thio)-3-(aza)-phenoxazin-1-yl, 7-(aminoalkylhydroxy)-1,3-(diaza)-2-(oxo)-phenthiazin-1-yl, 7-(aminoalkylhydroxy)-1-(aza)-2-(thio)-3-(aza)-phenthiazin-1-yl, 7-(guanidiniumalkylhydroxy)-1,3-(diaza)-2-(oxo)-phenoxazin-1-yl, 7-(guanidiniumalkylhydroxy)-1-(aza)-2-(thio)-3-(aza)-phenoxazin-1-yl, 7-(guanidiniumalkyl-hydroxy)-1,3-(diaza)-2-(oxo)-phenthiazin-1-yl, 7-(guanidiniumalkylhydroxy)-1-(aza)-2-(thio)-3-(aza)-phenthiazin-1-yl, 1,3,5-(triaza)-2,6-(dioxa)-naphthalene, inosine, xanthine, hypoxanthine, nubularine, tubercidine, isoguanisine, inosinyl, 2-aza-inosinyl, 7-deaza-inosinyl, nitroimidazolyl, nitropyrazolyl, nitrobenzimidazolyl, nitroindazolyl, aminoindolyl, pyrrolopyrimidinyl, 3-(methyl)isocarbostyrilyl, 5-(methyl)isocarbostyrilyl, 3-(methyl)-7-(propynyl)isocarbostyrilyl, 7-(aza)indolyl, 6-(methyl)-7-(aza)indolyl, imidizopyridinyl, 9-(methyl)-imidizopyridinyl, pyrrolopyrizinyl, isocarbostyrilyl, 7-(propynyl)isocarbostyrilyl, propynyl-7-(aza)indolyl, 2,4,5-(trimethyl)phenyl, 4-(methyl)indolyl, 4,6-(dimethyl)indolyl, phenyl, napthalenyl, anthracenyl, phenanthracenyl, pyrenyl, stilbenzyl, tetracenyl, pentacenyl, difluorotolyl, 4-(fluoro)-6-(methyl)benzimidazole, 4-(methyl)benzimidazole, 6-(azo)thymine, 2-pyridinone, 5 nitroindole, 3 nitropyrrole, 6-(aza)pyrimidine, 2 (amino)purine, 2,6-(diamino)purine, 5 substituted pyrimidines, N2-substituted purines, N6-substituted purines, O6-substituted purines, substituted 1,2,4-triazoles, pyrrolo-pyrimidin-2-on-3-yl, 6-phenyl-pyrrolo-pyrimidin-2-on-3-yl, para-substituted-6-phenyl-pyrrolo-pyrimidin-2-on-3-yl, ortho-substituted-6-phenyl-pyrrolo-pyrimidin-2-on-3-yl, bis-ortho-substituted-6-phenyl-pyrrolo-pyrimidin-2-on-3-yl, para-(aminoalkylhydroxy)-6-phenyl-pyrrolo-pyrimidin-2-on-3-yl, ortho-(aminoalkylhydroxy)-6-phenyl-pyrrolo-pyrimidin-2-on-3-yl, bis-ortho-(aminoalkylhydroxy)-6-phenyl-pyrrolo-pyrimidin-2-on-3-yl, pyridopyrimidin-3-yl, 2-oxo-7-amino-pyridopyrimidin-3-yl, 2-oxo-pyridopyrimidine-3-yl, or any O-alkylated or N-alkylated derivatives thereof. Modified nucleobases also include natural bases that comprise conjugated moieties, e.g., a ligand.

[0234] Further nucleobases include those disclosed in U.S. Pat. No. 3,687,808; MODIFIED NUCLEOSIDES BIOCHEM., BIOTECH. & MEDICINE (Herdewijn, ed., Wiley-VCH, 2008); PCT/US09/038,425; CONCISE ENCYCLOPEDIA OF POLYMER SCIENCE & ENGIN. 858-59 (Kroschwitz ed., John Wiley & Sons, 1990); Englisch et al., 30 Angewandte Chemie, Int'Ed. 613 (1991); Sanghvi, 15 DsRNA RESEARCH & APPLICATIONS 289-302 (Crooke & Lebleu, eds., CRC Press, Boca Raton, Fla., 1993). Certain of these nucleobases are particularly useful for increasing the binding affinity of the oligomeric compounds featured in the invention. These include 5-substituted pyrimidines, 6-azapyrimidines and N-2, N-6 and 0-6 substituted purines, including 2-aminopropyladenine, 5-propynyluracil and 5-propynylcytosine. 5-methylcytosine substitutions have been shown to increase nucleic acid duplex stability by 0.6-1.2° C. (Sanghvi, 276-78 (1993)), and are exemplary base substitutions, even more particularly when combined with 2′-O-methoxyethyl sugar modifications.

[0235] Representative patents that teach the preparation of certain of the above noted modified nucleobases as well as other modified nucleobases include, but are not limited to, the above noted U.S. Pat. No. 3,687,808; U.S. Pat. No. 4,845,205; U.S. Pat. No. 5,130,30; U.S. Pat. No. 5,134,066; U.S. Pat. No. 5,175,273; U.S. Pat. No. 5,367,066; U.S. Pat. No. 5,432,272; U.S. Pat. No. 5,457,191 U.S. Pat. No. 5,457,187; U.S. Pat. No. 5,459,255; U.S. Pat. No. 5,484,908; U.S. Pat. No. 5,502,177; U.S. Pat. No. 5,525,711; U.S. Pat. No. 5,552,540; U.S. Pat. No. 5,587,469; U.S. Pat. No. 5,594,121, U.S. Pat. No. 5,596,091; U.S. Pat. No. 5,614,617; U.S. Pat. No. 5,681,941; U.S. Pat. No. 6,015,886; U.S. Pat. No. 6,147,200; U.S. Pat. No. 6,166,197; U.S. Pat. No. 6,222,025; U.S. Pat. No. 6,235,887; U.S. Pat. No. 6,380,368; U.S. Pat. No. 6,528,640; U.S. Pat. No. 6,639,062; U.S. Pat. No. 6,617,438; U.S. Pat. No. 7,045,610; U.S. Pat. No. 7,427,672; and U.S. Pat. No. 7,495,088; and U.S. Pat. No. 5,750,692.

[0236] The oligonucleotides can also be modified to include one or more locked nucleic acids (LNA). A locked nucleic acid is a nucleotide having a modified ribose moiety in which the ribose moiety comprises an extra bridge connecting the 2′ and 4′ carbons. This structure effectively “locks” the ribose in the 3′-endo structural conformation. The addition of locked nucleic acids to oligonucleotide molecules has been shown to increase oligonucleotide molecule stability in serum, and to reduce off-target effects. Elmen et al., 33 Nucl. Acids Res. 439-47 (2005); Mook et al., 6 Mol. Cancer. Ther. 833-43 (2007); Grunweller et al., 31 Nucl. Acids Res. 3185-93 (2003); U.S. Pat. No. 6,268,490; U.S. Pat. No. 6,670,461; U.S. Pat. No. 6,794,499; U.S. Pat. No. 6,998,484; U.S. Pat. No. 7,053,207; U.S. Pat. No. 7,084,125; and U.S. Pat. No. 7,399,845.

[0237] Another modification of the oligonucleotides (e.g., of a RNA effector molecule) featured in the invention involves chemically linking to the oligonucleotide one or more ligands, moieties or conjugates that enhance the activity, cellular distribution or cellular uptake of the oligonucleotide. Such moieties include but are not limited to lipid moieties such as a cholesterol moiety (Letsinger et al., 86 PNAS 6553-56 (1989); cholic acid (Manoharan et al., 4 Biorg. Med. Chem. Let. 1053-60 (1994)); a thioether, e.g., beryl-5-tritylthiol (Manoharan et al., 660 Ann. N.Y. Acad. Sci. 306309 (1992); Manoharan et al., 3 Biorg. Med. Chem. Let. 2765-70 (1993)); a thiocholesterol (Oberhauser et al., 20 Nucl. Acids Res. 533-38 (1992)); an aliphatic chain, e.g., dodecandiol or undecyl residues (Saison-Behmoaras et al., 10 EMBO J. 1111-18 (1991); Kabanov et al., 259 FEBS Lett. 327-30 (1990); Svinarchuk et al., 75 Biochimie 49-54 (1993)); a phospholipid, e.g., di-hexadecyl-rac-glycerol or triethyl-ammonium 1,2-di-O-hexadecyl-rac-glycero-3-phosphonate (Manoharan et al., 36 Tetrahedron Lett. 3651-54 (1995); Shea et al., 18 Nucl. Acids Res. 3777-83 (1990)); a polyamine or a polyethylene glycol chain (Manoharan et al., 14 Nucleosides & Nucleotides 969-73 (1995)); or adamantane acetic acid (Manoharan et al., Tetrahedron Lett., 1995); a palmityl moiety (Mishra et al., 1264 Biochim. Biophys. Acta 229-37 (1995)); or an octadecylamine or hexylamino-carbonyloxycholesterol moiety (Crooke et al., 227 J. Pharmacol. Exp. Ther. 923-37 (1996)).

[0238] In one embodiment, a ligand alters the distribution, targeting or lifetime of a RNA effector molecule agent into which it is incorporated. In some embodiments a ligand provides an enhanced affinity for a selected target, e.g., molecule, cell or cell type, compartment, e.g., a cellular or organ compartment, tissue, organ or region of the body, as, e.g., compared to a species absent such a ligand. Ideally, ligands will not take part in duplex pairing in a duplexed nucleic acid.

[0239] Ligands can include a naturally occurring substance, such as a protein (e.g., human serum albumin (HSA), low-density lipoprotein (LDL), or globulin); carbohydrate (e.g., a dextran, pullulan, chitin, chitosan, inulin, cyclodextrin or hyaluronic acid); or a lipid. The ligand can also be a recombinant or synthetic molecule, such as a synthetic polymer, e.g., a synthetic polyamino acid. Examples of polyamino acids include polyamino acid is a polylysine (PLL), poly L aspartic acid, poly L-glutamic acid, styrene-maleic acid anhydride copolymer, poly(L-lactide-co-glycolied) copolymer, divinyl ether-maleic anhydride copolymer, N-(2-hydroxypropyl)methacrylamide copolymer (HMPA), polyethylene glycol (PEG), polyvinyl alcohol (PVA), polyurethane, poly(2-ethylacryllic acid), N-isopropylacrylamide polymers, or polyphosphazine. Example polyamines include polyethylenimine, polylysine (PLL), spermine, spermidine, polyamine, pseudopeptide-polyamine, peptidomimetic polyamine, dendrimer polyamine, arginine, amidine, protamine, cationic lipid, cationic porphyrin, quaternary salt of a polyamine, or an alpha helical peptide

[0240] Ligands can also include targeting groups, e.g., a cell or tissue targeting agent, e.g., a lectin, glycoprotein, lipid or protein, e.g., an antibody, that binds to a specified cell type such as a kidney cell. A targeting group can be a thyrotropin, melanotropin, lectin, glycoprotein, surfactant protein A, Mucin carbohydrate, multivalent lactose, multivalent galactose, N-acetyl-galactosamine, N-acetyl-gulucosamine multivalent mannose, multivalent fucose, glycosylated polyaminoacids, multivalent galactose, transferrin, bisphosphonate, polyglutamate, polyaspartate, a lipid, cholesterol, a steroid, bile acid, folate, vitamin B12, biotin, or an RGD peptide or RGD peptide mimetic.

[0241] Other examples of ligands include dyes, intercalating agents (e.g. acridines), cross-linkers (e.g. psoralene, mitomycin C), porphyrins (TPPC4, texaphyrin, Sapphyrin), polycyclic aromatic hydrocarbons (e.g., phenazine, dihydrophenazine), artificial endonucleases (e.g., EDTA), lipophilic molecules, e.g, cholesterol, cholic acid, adamantane acetic acid, 1-pyrene butyric acid, dihydrotestosterone, 1,3-Bis-O(hexadecyl)glycerol, geranyloxyhexyl group, hexadecylglycerol, borneol, menthol, 1,3-propanediol, heptadecyl group, palmitic acid, myristic acid, O3-(oleoyl)lithocholic acid, O3-(oleoyl)cholenic acid, dimethoxytrityl, or phenoxazine) and peptide conjugates (e.g., antennapedia peptide, Tat peptide), alkylating agents, phosphate, amino, mercapto, PEG (e.g., PEG-40K), MPEG, [MPEG]₂, polyamino, alkyl, substituted alkyl, radiolabeled markers, enzymes, haptens (e.g. biotin), transport/absorption facilitators (e.g., aspirin, vitamin E, folic acid), synthetic ribonucleases (e.g., imidazole, bisimidazole, histamine, imidazole clusters, acridine-imidazole conjugates, Eu³⁺ complexes of tetraazamacrocycles), dinitrophenyl, HRP, or AP.

[0242] Ligands can be proteins, e.g., glycoproteins, or peptides, e.g., molecules having a specific affinity for a co-ligand, or antibodies e.g., an antibody, that binds to a specified cell type such as a cancer cell, endothelial cell, or bone cell. Ligands can also include hormones and hormone receptors. They can also include non-peptidic species, such as lipids, lectins, carbohydrates, vitamins, cofactors, multivalent lactose, multivalent galactose, N-acetyl-galactosamine, N-acetyl-gulucosamine multivalent mannose, or multivalent fucose. The ligand can be, for example, a lipopolysaccharide, an activator of p38 MAP kinase, or an activator of NF-κB.

[0243] The ligand can be a substance, e.g., a drug, which can increase the uptake of the RNA effector molecule agent into the cell, for example, by disrupting the cell's cytoskeleton, e.g., by disrupting the cell's microtubules, microfilaments, and/or intermediate filaments. The drug can be, for example, taxol, vincristine, vinblastine, cytochalasin, nocodazole, japlakinolide, latrunculin A, phalloidin, swinholide A, indanocine, or myoservin.

[0244] An example ligand is a lipid or lipid-based molecule. Such a lipid or lipid-based molecule preferably binds a serum protein, e.g., human serum albumin (HSA). An HSA binding ligand allows for distribution of the conjugate to a target tissue, e.g., a non-kidney target tissue of the body. For example, the target tissue can be the liver, including parenchymal cells of the liver. Other molecules that can bind HSA can also be used as ligands. For example, Naproxen or aspirin can be used. A lipid or lipid-based ligand can (a) increase resistance to degradation of the conjugate, (b) increase targeting or transport into a target cell or cell membrane, and/or (c) can be used to adjust binding to a serum protein, e.g., HSA.

[0245] A lipid based ligand can be used to modulate, e.g., control the binding of the conjugate to a target tissue. For example, a lipid or lipid-based ligand that binds to HSA more strongly will be less likely to be targeted to the kidney and therefore less likely to be cleared from the embryo. A lipid or lipid-based ligand that binds to HSA less strongly can be used to target the conjugate to the kidney. For example, the lipid based ligand binds HSA, or it binds HSA with a sufficient affinity such that the conjugate will be distributed to a non-kidney tissue but also be reversible. Alternatively, the lipid-based ligand binds HSA weakly or not at all, such that the conjugate will be distributed to the kidney. Other moieties that target to kidney cells can also be used in place of or in addition to the lipid-based ligand.

[0246] In another aspect, the ligand is a moiety, e.g., a vitamin, that is taken up by an embryonic cell, e.g., a proliferating cell. Exemplary vitamins include vitamin A, E, and K. Other exemplary vitamins include are B vitamin, e.g., folic acid, B12, riboflavin, biotin, pyridoxal or other vitamins or nutrients taken up by embryonic cells. Also included are HSA and low density lipoproteins.

[0247] In another aspect, the ligand is a cell-permeation agent, preferably a helical cell-permeation agent. Preferably, the agent is amphipathic. An exemplary agent is a peptide such as tat or antennopedia. If the agent is a peptide, it can be modified, including a peptidylmimetic, invertomers, non-peptide or pseudo-peptide linkages, and use of D-amino acids. The helical agent may be an α-helical agent, and may include a lipophilic and a lipophobic phase.

[0248] The ligand can be a peptide or peptidomimetic. A peptidomimetic (also referred to herein as an oligopeptidomimetic) is a molecule capable of folding into a defined 3-dimensional structure similar to a natural peptide. The attachment of peptide and peptidomimetics to RNA effector molecule agents can affect pharmacokinetic distribution of the RNA effector molecule, such as by enhancing cellular recognition and absorption. The peptide or peptidomimetic moiety can be about 5 to 50 amino acids long, e.g., about 5, 10, 15, 20, 25, 30, 35, 40, 45, or 50 amino acids long (see Table 1, for example).

TABLE 1
Exemplary Cell Permeation Peptides

| Cell Permeation Peptide | Amino acid Sequence | Reference |
|---|---|---|
| Penetratin | RQIKIWFQNRRMKWKK | Derossi et al., 269 J. Biol. |
| | (SEQ ID NO: 1) | Chem. 10444 (1994) |
| Tat fragment (48-60) | GRKKRRQRRRPPQC | Vives et al., 272 J. Biol. |
| | (SEQ ID NO: 2) | Chem. 16010 (1997) |
| Signal Sequence-based | GALFLGWLGAAGSTMGAWSQPKKKRKV | Chaloin et al., 243 |
| peptide | (SEQ ID NO: 3) | Biochem. Biophys. Res. |
| | | Commun 601 (1998) |
| PVEC | LLIILRRRIRKQAHAHSK | Elmquist et al., 269 Exp. |
| | (SEQ ID NO: 4) | Cell Res. 237 (2001) |
| Transportan | GWTLNSAGYLLKINLKALAALAKKIL | Pooga et al., 12 FASEB |
| | (SEQ ID NO: 5) | J. 67 (1998) |
| Amphiphilic model | KLALKLALKALKAALKLA | Oehlke et al., 2 Mol. |
| peptide | (SEQ ID NO: 6) | Ther. 339 (2000) |
| Arg₉ | RRRRRRRRR | Mitchell et al., 56 J. Pept. |
| | (SEQ ID NO: 7) | Res. 318 (2000) |
| Bacterial cell wall | KFFKFFKFFK | |
| permeating | (SEQ ID NO: 8) | |
| LL-37 | LLGDFFRKSKEKIGKEFKRIVQRIKDFLRNLVP | |
| | RTES | |
| | (SEQ ID NO: 9) | |
| Cecropin P1 | SWLSKTAKKLENSAKKRISEGIAIAIQGGPR | |
| | (SEQ ID NO: 10) | |
| α-defensin | ACYCRIPACIAGERRYGTCIYQGRLWAFCC | |
| | (SEQ ID NO: 11) | |
| b-defensin | DHYNCVSSGGQCLYSACPIFTKIQGTCYRGKAK | |
| | CCK | |
| | (SEQ ID NO: 12) | |
| Bactenecin | RKCRIVVIRVCR | |
| | (SEQ ID NO: 13) | |
| PR-39 | RRRPRPPYLPRPRPPPFFPPRLPPRIPPGFPPR | |
| | FPPRFPGKR-NH2 | |
| | (SEQ ID NO: 14) | |
| Indolicidin | ILPWKWPWWPWRR-NH2 | |
| | (SEQ ID NO: 15) | |

[0249] A peptide or peptidomimetic can be, for example, a cell permeation peptide, cationic peptide, amphipathic peptide, or hydrophobic peptide (e.g., consisting primarily of Tyr, Trp or Phe). The peptide moiety can be a dendrimer peptide, constrained peptide or crosslinked peptide. In another alternative, the peptide moiety can include a hydrophobic membrane translocation sequence (MTS). An exemplary hydrophobic MTS-containing peptide is RFGF having the amino acid sequence AAVALLPAVLLALLAP (SEQ ID NO:1441 RFGF analogue (e.g., amino acid sequence AALLPVLLAAP (SEQ ID NO:1442) containing a hydrophobic MTS can also be a targeting moiety. The peptide moiety can be a “delivery” peptide that carres large polar molecules including peptides, oligonucleotides, and protein across cell membranes. For example, sequences from the HIV Tat protein (GRKKRRQRRRPPQ (SEQ ID NO:1443)) and the Drosophila antennapedia protein (RQIKIWFQNRRMKWKK (SEQ ID NO:1444)) can function as delivery peptides. A peptide or peptidomimetic can be encoded by a random sequence of DNA, such as a peptide identified from a phage-display library, or one-bead-one-compound (OBOC) combinatorial library. Lam et al., 354 Nature 82-84 (1991). The peptide or peptidomimetic can be tethered to a dsRNA agent via an incorporated monomer unit is a cell targeting peptide such as an arginine-glycine-aspartic acid (RGD)-peptide, or RGD mimic. As noted, the peptide moieties can have a structural modification, such as to increase stability or direct conformational properties. Any of the structural modifications described herein can be utilized.

[0250] An RGD peptide moiety can be used to target a tumor cell, such as an endothelial tumor cell or a breast cancer tumor cell. Zitzmann et al., 62 Cancer Res. 5139-43 (2002). An RGD peptide can facilitate targeting of an dsRNA agent to tumors of a variety of other tissues, including the lung, kidney, spleen, or liver. Aoki et al., 8 Cancer Gene Ther. 783-87 (2001). Preferably, the RGD peptide will facilitate targeting of an RNA effector molecule agent to the kidney. The RGD peptide can be linear or cyclic, and can be modified, e.g., glycosylated or methylated to facilitate targeting to specific tissues. For example, a glycosylated RGD peptide can deliver a RNA effector molecule agent to a tumor cell expressing αVβ3. Haubner et al., 42 J. Nucl. Med. 326-36 (2001).

[0251] A “cell permeation peptide” is capable of permeating a cell, e.g., an avian cell. It may be, for example, an α-helical linear peptide (e.g., LL-37 or Ceropin P1), a disulfide bond-containing peptide (e.g., α-defensin, β-defensin or bactenecin), or a peptide containing only one or two dominating amino acids (e.g., PR-39 or indolicidin). A cell permeation peptide can also include a nuclear localization signal (NLS). For example, a cell permeation peptide can be a bipartite amphipathic peptide, such as MPG, which is derived from the fusion peptide domain of HIV-1 gp41 and the NLS of SV40 large T antigen. Simeoni et al., 31 Nucl. Acids Res. 2717-24 (2003).

[0252] Representative patents that teach the preparation of oligonucleotide conjugates include, but are not limited to, U.S. Pat. No. 4,828,979; U.S. Pat. No. 4,948,882; U.S. Pat. No. 5,218,105; U.S. Pat. No. 5,525,465; U.S. Pat. No. 5,541,313; U.S. Pat. No. 5,545,730; U.S. Pat. No. 5,552,538; U.S. Pat. No. 5,578,717, U.S. Pat. No. 5,580,731; U.S. Pat. No. 5,591,584; U.S. Pat. No. 5,109,124; U.S. Pat. No. 5,118,802; U.S. Pat. No. 5,138,045; U.S. Pat. No. 5,414,077; U.S. Pat. No. 5,486,603; U.S. Pat. No. 5,512,439; U.S. Pat. No. 5,578,718; U.S. Pat. No. 5,608,046; U.S. Pat. No. 4,587,044; U.S. Pat. No. 4,605,735; U.S. Pat. No. 4,667,025; U.S. Pat. No. 4,762,779; U.S. Pat. No. 4,789,737; U.S. Pat. No. 4,824,941; U.S. Pat. No. 4,835,263; U.S. Pat. No. 4,876,335; U.S. Pat. No. 4,904,582; U.S. Pat. No. 4,958,013; U.S. Pat. No. 5,082,830; U.S. Pat. No. 5,112,963; U.S. Pat. No. 5,214,136; U.S. Pat. No. 5,082,830; U.S. Pat. No. 5,112,963; U.S. Pat. No. 5,214,136; U.S. Pat. No. 5,245,022; U.S. Pat. No. 5,254,469; U.S. Pat. No. 5,258,506; U.S. Pat. No. 5,262,536; U.S. Pat. No. 5,272,250; U.S. Pat. No. 5,292,873; U.S. Pat. No. 5,317,098; U.S. Pat. No. 5,371,241, U.S. Pat. No. 5,391,723; U.S. Pat. No. 5,416,203, U.S. Pat. No. 5,451,463; U.S. Pat. No. 5,510,475; U.S. Pat. No. 5,512,667; U.S. Pat. No. 5,514,785; U.S. Pat. No. 5,565,552; U.S. Pat. No. 5,567,810; U.S. Pat. No. 5,574,142; U.S. Pat. No. 5,585,481; U.S. Pat. No. 5,587,371; U.S. Pat. No. 5,595,726; U.S. Pat. No. 5,597,696; U.S. Pat. No. 5,599,923; U.S. Pat. No. 5,599,928; U.S. Pat. No. 5,688,941; U.S. Pat. No. 6,294,664; U.S. Pat. No. 6,320,017; U.S. Pat. No. 6,576,752; U.S. Pat. No. 6,783,931; U.S. Pat. No. 6,900,297; and U.S. Pat. No. 7,037,646.

[0253] It is not necessary for all positions in a given compound to be uniformly modified, and in fact more than one of the aforementioned modifications can be incorporated in a single compound or even at a single nucleoside within sn oligonucleotide. The present invention also includes oligonucleotide molecule compounds which are chimeric compounds. “Chimeric” RNA effector molecule compounds or “chimeras,” in the context of this invention, are oligonucleotide compounds, such as dsRNAs, that contain two or more chemically distinct regions, each made up of at least one monomer unit, i.e., a nucleotide in the case of a dsRNA compound. These RNA effector molecules typically contain at least one region wherein the RNA is modified so as to confer upon the RNA effector molecule increased resistance to nuclease degradation, increased cellular uptake, and/or increased binding affinity for the target nucleic acid. An additional region of the oligonucleotide can serve as a substrate for enzymes capable of cleaving RNA:DNA or RNA:RNA hybrids. By way of example, RNase H is a cellular endonuclease which cleaves the RNA strand of an RNA:DNA duplex. Activation of RNase H, therefore, results in cleavage of the RNA target, thereby greatly enhancing the efficiency of RNA effector molecule inhibition of gene expression. Consequently, comparable results can often be obtained with shorter RNA effector molecules when chimeric dsRNAs are used, compared to phosphorothioate deoxydsRNAs hybridizing to the same target region. Cleavage of the oligonucleotide can be routinely detected by gel electrophoresis and, if necessary, associated nucleic acid hybridization techniques known in the art.

[0254] In certain instances, the oligonucleotides of a RNA effector molecule can be modified by a non-ligand group. A number of non-ligand molecules have been conjugated to oligonucleotides in order to enhance the activity, cellular distribution or cellular uptake of the oligonucleotides, and procedures for performing such conjugations are available in the scientific literature. Such non-ligand moieties have included lipid moieties, such as cholesterol (Kubo et al., 365 Biochem. Biophys. Res. Comm. 54-61 (2007)); Letsinger et al., 86 PNAS 6553 (1989)); cholic acid (Manoharan et al., 1994); a thioether, e.g., hexyl-5-tritylthiol (Manoharan et al., 1992; Manoharan et al., 1993); a thiocholesterol (Oberhauser et al., 1992); an aliphatic chain, e.g., dodecandiol or undecyl residues (Saison-Behmoaras et al., 1991; Kabanov et al., 259 FEBS Lett. 327 (1990); Svinarchuk et al., 75 Biochimie 75 (1993)); a phospholipid, e.g., di-hexadecyl-rac-glycerol or triethylammonium 1,2-di-O-hexadecyl-rac-glycero-3-H-phosphonate (Manoharan et al., 1995); Shea et al., 18 Nucl. Acids Res. 3777 (1990)); a polyamine or a polyethylene glycol chain (Manoharan et al., Nucleosides & Nucleotides, 1995); or adamantane acetic acid (Manoharan et al., Tetrahedron Lett., 1995); a palmityl moiety (Mishra et al., 1995); or an octadecylamine or hexylamino-carbonyl-oxycholesterol moiety (Crooke et al., 1996). Representative United States patents that teach the preparation of such RNA conjugates have been listed herein. Typical conjugation protocols involve the synthesis of an oligonucleotide bearing an aminolinker at one or more positions of the sequence. The amino group is then reacted with the molecule being conjugated using appropriate coupling or activating reagents. The conjugation reaction can be performed either with the RNA still bound to the solid support or following cleavage of the RNA, in solution phase. Purification of the RNA conjugate by HPLC typically affords the pure conjugate.

[0255] The delivery of an oligonucleotide (e.g., a RNA effector molecule) to cells according to methods provided herein can be achieved in a number of different ways. For example, delivery can be performed directly by administering a composition comprising a RNA effector molecule, e.g. a dsRNA, into cell culture. Alternatively, delivery can be performed indirectly by administering into the cell one or more vectors that encode and direct the expression of the RNA effector molecule. These alternatives are discussed further.

[0256] Oligonucleotides can be modified to prevent rapid degradation of the dsRNA by endo- and exo-nucleases and avoid undesirable off-target effects. For example, RNA effector molecules can be modified by chemical conjugation to lipophilic groups such as cholesterol to enhance cellular uptake and prevent degradation. In an alternative embodiment, RNA effector molecules can be delivered using a drug delivery system such as a nanoparticle, a dendrimer, a polymer, a liposome, or a cationic delivery system. Positively charged cationic delivery systems facilitate binding of an RNA effector molecule (negatively charged) and also enhance interactions at the negatively charged cell membrane to permit efficient cellular uptake. Cationic lipids, dendrimers, or polymers can either be bound to RNA effector molecules, or induced to form a vesicle or micelle that encases the RNA effector molecule. See, e.g., Kim et al., 129 J. Contr. Release 107-16 (2008). Methods for making and using cationic-RNA effector molecule complexes are well within the abilities of those skilled in the art. See e.g., Sorensen et al 327 J. Mol. Biol. 761-66 (2003); Verma et al., 9 Clin. Cancer Res. 1291-1300 (2003); Arnold et al., 25 J. Hypertens. 197-205 (2007).

[0257] Where the RNA effector molecule is a double-stranded molecule, such as a small interfering RNA (siRNA), comprising a sense strand and an antisense strand, the sense strand and antisense strand can be separately and temporally exposed to a cell, cell lysates, tissue, or cell culture. The phrase “separately and temporally” refers to the introduction of each strand of a double-stranded RNA effector molecule to a cell, cell lysates, tissue or cell culture in a single-stranded form, e.g., in the form of a non-annealed mixture of both strands or as separate, i.e., unmixed, preparations of each strand. In some embodiments, there is a time interval between the introduction of each strand which can range from seconds to several minutes to about an hour or more, e.g., 12, 24, 48, 72, 84, 96, or 108 hours or more. Separate and temporal administration can be performed with canonical or non-canonical RNA effector molecules.

[0258] It is also contemplated herein that a plurality of RNA effector molecules are administered in a separate and temporal manner. Thus, each of a plurality of RNA effector molecules can be administered at a separate time or at a different frequency interval to achieve the desired average percent inhibition for the target gene. For example, RNA effector molecules targeting Bak can be administered more frequently than RNA effector molecule targeting LDH, as the expression of Bak recovers faster following treatment with a Bak RNA effector molecule. In one embodiment, the RNA effector molecules are added at a concentration from approximately 0.01 nM to 200 nM. In another embodiment, the RNA effector molecules are added at an amount of approximately 50 molecules per cell up to and including 500,000 molecules per cell. In another embodiment, the RNA effector molecules are added at a concentration from about 0.1 fmol/10⁶ cells to about 1 pmol/10⁶ cells.

[0259] In another aspect, a RNA effector molecule for modulating expression of a target gene can be expressed from transcription units inserted into DNA or RNA vectors. See, e.g., Couture et al., 12 TIG 5-10 (1996); WO 00/22113; WO 00/22114; U.S. Pat. No. 6,054,299. Expression can be transient (on the order of hours to weeks) or sustained (weeks to months or longer), depending upon the specific construct used and the target tissue or cell type. These transgenes can be introduced as a linear construct, a circular plasmid, or a viral vector, which can be an integrating or non-integrating vector. The transgene can also be constructed to permit it to be inherited as an extra chromosomal plasmid. Gassmann, et al., 92 P.N.A.S. 1292 (1995).

[0260] The individual strand or strands of a RNA effector molecule can be transcribed from a promoter on an expression vector. Where two separate strands are to be expressed to generate, for example, a dsRNA, two separate expression vectors can be co-introduced (e.g., by transfection or infection) into a target cell. Alternatively each individual strand of a dsRNA can be transcribed by promoters both of which are located on the same expression plasmid. In one embodiment, a dsRNA is expressed as an inverted repeat joined by a linker polynucleotide sequence such that the dsRNA has a stem and loop structure.

[0261] RNA effector molecule expression vectors are generally DNA plasmids or viral vectors. Expression vectors compatible with eukaryotic cells, such as those compatible with vertebrate cells, insect cells, or yeast cells can be used to produce recombinant constructs for the expression of an RNA effector molecule as described herein. Eukaryotic cell expression vectors are well known in the art and are available from a number of commercial sources. Typically, such vectors are provided containing convenient restriction sites for insertion of the desired nucleic acid segment. RNA effector molecule expressing vectors can be delivered directly to target cells using standard transfection and transduction methods.

[0262] RNA effector molecule expression plasmids can be transfected into target cells as a complex with cationic lipid carriers (e.g., Oligofectamine™ reagent) or non-cationic lipid-based carriers (e.g., TRANSIT-TKO® transfection reagent, Mims Bio LLC, Madison, Wis.). Multiple lipid transfections for RNA effector molecule-mediated knockdowns targeting different regions of a target RNA over a period of a week or more are also contemplated by the invention. Successful introduction of vectors into host cells can be monitored using various known methods. For example, transient transfection can be signaled with a reporter, such as a fluorescent marker, such as Green Fluorescent Protein (GFP). Stable transfection of cells ex vivo can be ensured using markers that provide the transfected cell with resistance to specific environmental factors (e.g., antibiotics and drugs), such as hygromycin B resistance. RNA effector molecule expression plasmids can be transfected into target cells as a complex with cationic lipid carriers (e.g., Oligofectamine™ reagent) or non-cationic lipid-based carriers (e.g., TRANSIT-TKO® transfection reagent). Multiple lipid transfections for RNA effector molecule-mediated knockdowns targeting different regions of a target RNA over a period of a week or more are also contemplated by the invention. Successful introduction of vectors into host cells can be monitored using various known methods. For example, transient transfection can be signaled with a reporter, such as a fluorescent marker, such as GFP. Stable transfection of cells ex vivo can be ensured using markers that provide the transfected cell with resistance to specific environmental factors (e.g., antibiotics and drugs), such as hygromycin B resistance

[0263] Viral vector systems which can be utilized with the methods and compositions described herein include, but are not limited to, (a) adenovirus vectors; (b) retrovirus vectors, including but not limited to lentiviral vectors, moloney murine leukemia virus, etc.; (c) adeno-associated virus vectors; (d) herpes simplex virus vectors; (e) SV40 vectors; (f) polyoma virus vectors; (g) papilloma virus vectors; (h) picornavirus vectors; (i) pox virus vectors such as an orthopox, e.g., vaccinia virus vectors or avipox, e.g. canary pox or fowl pox; and (j) a helper-dependent or gutless adenovirus. Replication-defective viruses can also be advantageous. Different vectors will or will not become incorporated into the cells' genome. The constructs can include viral sequences for transfection, if desired. Alternatively, the construct can be incorporated into vectors capable of episomal replication, e.g., EPV and EBV vectors. Constructs for the recombinant expression of an RNA effector molecule will generally require regulatory elements, e.g., promoters, enhancers, etc., to ensure the expression of the RNA effector molecule in target cells. Other aspects to consider for vectors and constructs are further described herein.

[0264] Vectors useful for the delivery of an RNA effector molecule will include regulatory elements (promoter, enhancer, etc.) sufficient for expression of the RNA effector molecule in the desired target cell or tissue. The regulatory elements can be chosen to provide either constitutive or regulated/inducible expression.

[0265] Expression of the RNA effector molecule can be precisely regulated, for example, by using an inducible regulatory sequence that is sensitive to certain physiological regulators, e.g., glucose levels. Docherty et al., 8 FASEB J. 20-24 (1994). Such inducible expression systems, suitable for the control of dsRNA expression in cells include, for example, regulation by ecdysone, estrogen, progesterone, tetracycline, chemical inducers of dimerization, and isopropyl-beta-D1-thiogalactopyranoside (IPTG). A person skilled in the art would be able to choose the appropriate regulatory/promoter sequence based on the intended use of the RNA effector molecule transgene.

[0266] In a specific embodiment, viral vectors that contain nucleic acid sequences encoding an RNA effector molecule can be used. For example, a retroviral vector can be used. See Miller et al., 217 Meth. Enzymol. 581-99 (1993); U.S. Pat. No. 6,949,242. Retroviral vectors contain the components necessary for the correct packaging of the viral genome and integration into the host cell DNA. The nucleic acid sequences encoding an RNA effector molecule are cloned into one or more vectors, which facilitates delivery of the nucleic acid into a cell. More detail about retroviral vectors can be found, for example, in Boesen et al., 6 Biotherapy 291-302 (1994), which describes the use of a retroviral vector to deliver the mdr1 gene to hematopoietic stem cells in order to make the stem cells more resistant to chemotherapy. Other references illustrating the use of retroviral vectors in gene therapy include Clowes et al., 93 J. Clin. Invest. 644-651 (1994); Kiem et al., 83 Blood 1467-73 (1994); Salmons & Gunzberg, 4 Human Gene Ther. 129-11 (1993); Grossman & Wilson, 3 Curr. Opin. Genetics Devel. 110-14 (1993). Lentiviral vectors contemplated for use include, for example, the HIV based vectors described in U.S. Pat. No. 6,143,520; U.S. Pat. No. 5,665,557; and No. 5,981,276.

[0267] It should be noted, as discussed herein, that host cell-surface receptors for retroviral entry may be inhabited by ERV Env proteins (virus interference). See Miller, 93 P.N.A.S. 11407-13 (1996). The retroviral envelope (Env) protein mediates the binding of virus particles to their cellular receptors, enabling virus entry: the first step in a new replication cycle. If an ERV is expressed in a cell, re-infection by a related exogenous retrovirus is prevented through interference (also called receptor interference). The Env protein of an ERV that is inserted into the cell membrane will interfere with the corresponding exogenous virus by receptor competition. This protects the cell from being overloaded with retroviruses. For example, enJSRVs can block the entry of exogenous JSRVs because they all utilize the cellular hyaluronidase-2 as a receptor. Spencer et al., 77 J. Virol. 5749-53 (2003). It is noteworthy that defective ERVs are no less interfering. Two enJSRVs, enJS56A1 and enJSRV-20, contain a mutant gag polyprotein that can interfere with the late stage replication of exogenous JSRVs. Arnaud et al., 2 PLoS e170 (2007). Thus interference between defective and replication-competent retroviruses provides an important mechanism of ERV copy number control. Thus, receptor interference by ERV-expressed Env molecules (e.g., expressed by the HERV-H family) may hinder infection or re-infection of cells intended to produce recombinant proteins. Such effects may explain low copy number or low expression in retroviral vector-mediated recombinant host cells. Hence, a target gene of the present embodiments that inhibits expression of ERV Env protein(s) provides for increasing retroviral vector multiplicity in host cells and increased yield of immunogenic agent.

[0268] Adenoviruses are also contemplated for use in delivery of RNA effector molecules. A suitable AV vector for expressing an RNA effector molecule featured in the invention, a method for constructing the recombinant AV vector, and a method for delivering the vector into target cells, are described in Xia et al., 20 Nature Biotech. 1006-10 (2002).

[0269] Use of Adeno-associated virus (AAV) vectors is also contemplated (Walsh et al., 204 Proc. Soc. Exp. Biol. Med. 289-300 (1993); U.S. Pat. No. 5,436,146. In one embodiment, the RNA effector molecule can be expressed as two separate, complementary single-stranded RNA molecules from a recombinant AAV vector having, for example, either the U6 or H1 RNA promoters, or the cytomegalovirus (CMV) promoter. Suitable AAV vectors for expressing the dsRNA featured in the invention, methods for constructing the recombinant AV vector, and methods for delivering the vectors into target cells are described in Samulski et al., 61 J. Virol. 61: 3096-101 (1987); Fisher et al., 70 J. Virol, 70: 520-32 (1996); Samulski et al., 63 J. Virol. 3822-26 (1989); U.S. Pat. No. 5,252,479 and No. 5,139,941; WO 94/13788; WO 93/24641.

[0270] Another viral vector is a pox virus such as a vaccinia virus, for example an attenuated vaccinia such as Modified Virus Ankara (MVA) or NYVAC, an avipox such as fowl pox or canary pox.

[0271] The tropism of viral vectors can be modified by pseudotyping the vectors with envelope proteins or other surface antigens from other viruses, or by substituting different viral capsid proteins, as appropriate. For example, lentiviral vectors can be pseudotyped with surface proteins from vesicular stomatitis virus (VSV), rabies, Ebola, Mokola, Baculovirus, and the like. Mononegavirales, e.g., VSV or respiratory syncytial virus (RSV) may be pseudotyped with Baculovirus. U.S. Pat. No. 7,041,489. AAV vectors can be made to target different cells by engineering the vectors to express different capsid protein serotypes. See, e.g., Rabinowitz et al., 76 J. Virol. 791-801 (2002).

[0272] In one embodiment, the invention provides compositions containing a RNA effector molecule, as described herein, and an acceptable carrier. The composition containing the RNA effector molecule is useful for enhancing the production of an immunogenic agent by a cell by modulating the expression or activity of a target gene in the cell. Such compositions are formulated based on the mode of delivery. Provided herein are exemplary RNA effector molecules useful in improving the production of an immunogenic agent. In one embodiment, the RNA effector molecule is a siRNA. Alternatively, the RNA effector molecule is not a siRNA.

[0273] In another embodiment, a composition is provided herein comprising a plurality of RNA effector molecules that permit inhibition of expression of an immune response pathway and a cellular process; such as INFRA1 or CDKNA2 genes, and PTEN, BAK, FN1, or LDHA genes. The composition can optionally be combined (or administered) with at least one additional RNA effector molecule targeting an additional cellular process including, but not limited to: carbon metabolism and transport, apoptosis, RNAi uptake and/or efficiency, reactive oxygen species production, cell cycle control, protein folding, pyroglutamation protein modification, deamidase, glycosylation, disulfide bond formation, protein secretion, gene amplification, viral replication, viral infection, viral particle release, control of pH, and protein production.

[0274] In one embodiment, the compositions described herein comprise a plurality of RNA effector molecules. In one embodiment of this aspect, each of the plurality of RNA effector molecules is provided at a different concentration. In another embodiment of this aspect, each of the plurality of RNA effector molecules is provided at the same concentration. In another embodiment of this aspect, at least two of the plurality of RNA effector molecules are provided at the same concentration, while at least one other RNA effector molecule in the plurality is provided at a different concentration. It is appreciated one of skill in the art that a variety of combinations of RNA effector molecules and concentrations can be provided to a cell in culture to produce the desired effects described herein.

[0275] The compositions featured herein are administered in amounts sufficient to inhibit expression of target genes. In general, a suitable dose of RNA effector molecule will be in the range of 0.001 to 200.0 milligrams per unit volume per day. In another embodiment, the RNA effector molecule is provided in the range of 0.001 nM to 200 mM per day, generally in the range of 0.1 nM to 500 nM, inclusive. For example, the dsRNA can be administered at 0.01 nM, 0.05 nM, 0.1 nM, 0.5 nM, 0.75 nM, 1 nM, 1.5 nM, 2 nM, 3 nM, 10 nM, 20 nM, 30 nM, 40 nM, 50 nM, 100 nM, 200 nM, 400 nM, or 500 nM per single dose.

[0276] The composition can be administered once daily, or the RNA effector molecule can be administered as two, three, or more sub-doses at appropriate intervals throughout the day or delivery through a controlled release formulation. In that case, the RNA effector molecule contained in each sub-dose must be correspondingly smaller in order to achieve the total daily dosage. The dosage unit can also be compounded for delivery over several days, e.g., using a conventional sustained release formulation, which provides sustained release of the RNA effector molecule over a several-day-period. Sustained release formulations are well known in the art and are particularly useful for delivery of agents to a particular site, such as could be used with the agents of the present invention. It should be noted that when administering a plurality of RNA effector molecules, one should consider that the total dose of RNA effector molecules will be higher than when each is administered alone. For example, administration of three RNA effector molecules each at 1 nM (e.g., for effective inhibition of target gene expression) will necessarily result in a total dose of 3 nM to the cell. One of skill in the art can modify the necessary amount of each RNA effector molecule to produce effective inhibition of each target gene while preventing any unwanted toxic effects to the embryo resulting from high concentrations of either the RNA effector molecules or delivery agent.

[0277] The effect of a single dose on target gene transcript levels can be long-lasting, such that subsequent doses are administered at not more than 3-, 4-, or 5-day intervals, or at not more than 1-, 2-, 3-, or 4-week intervals.

[0278] It is also noted that, in certain embodiments, it can be beneficial to contact the cells in culture with an RNA effector molecule such that a constant number (or at least a minimum number) of RNA effector molecules per each cell is maintained. Maintaining the levels of the RNA effector molecule as such can ensure that modulation of target gene expression is maintained even at high cell densities.

[0279] Alternatively, the amount of an RNA effector molecule can be administered according to the cell density. In such embodiments, the RNA effector molecule(s) is added at a concentration of at least 0.01 fmol/10⁶ cells, at least 0.1 fmol/10⁶ cells, at least 0.5 fmol/10⁶ cells, at least 0.75 fmol/10⁶ cells, at least 1 fmol/10⁶ cells, at least 2 fmol/10⁶ cells, at least 5 fmol/10⁶ cells, at least 10 fmol/10⁶ cells, at least 20 fmol/10⁶ cells, at least 30 fmol/10⁶ cells, at least 40 fmol/10⁶ cells, at least 50 fmol/10⁶ cells, at least 60 fmol/10⁶ cells, at least 100 fmol/10⁶ cells, at least 200 fmol/10⁶ cells, at least 300 fmol/10⁶ cells, at least 400 fmol/10⁶ cells, at least 500 fmol/10⁶ cells, at least 700 fmol/10⁶ cells, at least 800 fmol/10⁶ cells, at least 900 fmol/10⁶ cells, or at least 1 pmol/10⁶ cells, or more.

[0280] In an alternate embodiment, the RNA effector molecule is administered at a dose of at least 10 molecules per cell, at least 20 molecules per cell (molecules/cell), at least 30 molecules/cell, at least 40 molecules/cell, at least 50 molecules/cell, at least 60 molecules/cell, at least 70 molecules/cell, at least 80 molecules/cell, at least 90 molecules/cell at least 100 molecules/cell, at least 200 molecules/cell, at least 300 molecules/cell, at least 400 molecules/cell, at least 500 molecules/cell, at least 600 molecules/cell, at least 700 molecules/cell, at least 800 molecules/cell, at least 900 molecules/cell, at least 1000 molecules/cell, at least 2000 molecules/cell, at least 5000 molecules/cell or more.

[0281] In some embodiments, the RNA effector molecule is administered at a dose within the range of 10-100 molecules/cell, 10-90 molecules/cell, 10-80 molecules/cell, 10-70 molecules/cell, 10-60 molecules/cell, 10-50 molecules/cell, 10-40 molecules/cell, 10-30 molecules/cell, 10-20 molecules/cell, 90-100 molecules/cell, 80-100 molecules/cell, 70-100 molecules/cell, 60-100 molecules/cell, 50-100 molecules/cell, 40-100 molecules/cell, 30-100 molecules/cell, 20-100 molecules/cell, 30-60 molecules/cell, 30-50 molecules/cell, 40-50 molecules/cell, 40-60 molecules/cell, or any range therebetween.

[0282] In one embodiment of the methods described herein, the RNA effector molecule is provided to the cells in a continuous infusion. The continuous infusion can be initiated at day zero (e.g., the first day of cell culture or day of inoculation with an RNA effector molecule) or can be initiated at any time period during the biological production process. Similarly, the continuous infusion can be stopped at any time point during the biological production process. Thus, the infusion of a RNA effector molecule or composition can be provided and/or removed at a particular phase of cell growth, a window of time in the production process, or at any other desired time point. The continuous infusion can also be provided to achieve a “desired average percent inhibition” for a target gene, as that term is used herein.

[0283] In one embodiment, a continuous infusion can be used following an initial bolus administration of an RNA effector molecule to a cell culture. In this embodiment, the continuous infusion maintains the concentration of RNA effector molecule above a minimum level over a desired period of time. The continuous infusion can be delivered at a rate of 0.03 pmol/liter of culture/hour to 3 pmol/liter of culture/hour, for example, at 0.03 pmol/l/hour, 0.05 pmol/l/hour, 0.08 pmol/l/hour, 0.1 pmol/l/hour, 0.2 pmol/l/hour, 0.3 pmol/l/hour, 0.5 pmol/l/hour, 1.0 pmol/l/hour, 2 pmol/l/hour, or 3 pmol/l/hour, or any value therebetween.

[0284] In one embodiment, the RNA effector molecule is administered as a sterile aqueous solution. In another embodiment, the RNA effector molecule is formulated in a cationic or non-cationic lipid formulation. In still another embodiment, the RNA effector molecule is formulated in a cell medium suitable for culturing a host cell (e.g., a serum-free medium). In one embodiment, an initial concentration of RNA effector molecule(s) is supplemented with a continuous infusion of the RNA effector molecule to maintain modulation of expression of a target gene. In another embodiment, the RNA effector molecule is applied to cells in culture at a particular stage of cell growth (e.g., early log phase) in a bolus dosage to achieve a certain concentration (e.g., 1 nM), and provided with a continuous infusion of the RNA effector molecule.

[0285] The RNA effector molecule(s) can be administered once daily, or the RNA effector molecule treatment can be repeated (e.g., two, three, or more doses) by adding the composition to the culture medium at appropriate intervals/frequencies throughout the production of the biological product. As used herein the term “frequency” refers to the interval at which transfection of the cell culture occurs and can be optimized by one of skill in the art to maintain the desired level of inhibition for each target gene. In one embodiment, RNA effector molecules are contacted with cells in culture at a frequency of every 48 hours. In other embodiments, the RNA effector molecules are administered at a frequency of e.g., every 4 hours, every 6 hour, every 12 hours, every 18 hours, every 24 hours, every 36 hours, every 72 hours, every 84 hours, every 96 hours, every 5 days, every 7 days, every 10 days, every 14 days, every 3 weeks, or more during the production of the biological product. The frequency can also vary, such that the interval between each dose is different (e.g., first interval 36 hour, second interval 48 hour, third interval 72 hour, etc).

[0286] The term “frequency” can be similarly applied to nutrient feeding of a cell culture during the production of a biological product. The frequency of treatment with RNA effector molecule(s) and nutrient feeding need not be the same. To be clear, nutrients can be added at the time of RNA effector treatment or at an alternate time. The frequency of nutrient feeding can be a shorter interval or a longer interval than RNA effector molecule treatment. As but one example, the dose of RNA effector molecule can be applied at a 48-hour-interval while nutrient feeding may be applied at a 24-hour-interval. During the entire length of the interval for producing the biological product (e.g., 3 weeks) there can be more doses of nutrients than RNA effector molecules or less doses of nutrients than RNA effector molecules. Alternatively, the amount of treatments with RNA effector molecule(s) is equal to that of nutrient feedings.

[0287] The frequency of RNA effector molecule treatment can be optimized to maintain an “average percent inhibition” of a particular target gene. As used herein, the term “desired average percent inhibition” refers to the average degree of inhibition of target gene expression over time that is necessary to produce the desired effect and which is below the degree of inhibition that produces any unwanted or negative effects. For example, the desired inhibition of Bak is typically >80% inhibition to effect a decrease in apoptosis, while the desired average inhibition of LDH may be less (e.g., 70%) as high degrees of LDH average inhibition (e.g., 90%) decrease cell viability. In some embodiments, the desired average percent inhibition is at least 20%, at least 30%, at least 40%, at least 50%, at least 60%, at least 70%, at least 80%, at least 85%, at least 90%, at least 95%, at least 99%, or even 100% (i.e., absent). One of skill in the art can use routine cell death assays to determine the upper limit for desired percent inhibition (e.g., level of inhibition that produces unwanted effects). One of skill in the art can also use methods to detect target gene expression (e.g., PERT) to determine an amount of an RNA effector molecule that produces gene modulation. See Zhang et al., 102 Biotech. Bioengin. 1438-47 (2009). The percent inhibition is described herein as an average value over time, since the amount of inhibition is dynamic and can fluctuate slightly between doses of the RNA effector molecule.

[0288] In one embodiment of the methods described herein, the RNA effector molecule is added to the culture medium of the cells in culture. The methods described herein can be applied to any size of cell culture flask and/or bioreactor. For example, the methods can be applied in bioreactors or cell cultures of 1 L, 3 L, 5 L, 10 L, 15 L, 40 L, 100 L, 500 L, 1000 L, 2000 L, 3000 L, 4000 L, 5000 L or larger. In some embodiments, the cell culture size can range from 0.01 L to 5000 L, from 0.1 L to 5000 L, from 1 L to 5000 L, from 5 L to 5000 L, from 40 L to 5000 L, from 100 L to 5000 L, from 500 L to 5000 L, from 1000 to 5000 L, from 2000 to 5000 L, from 3000 to 5000 L, from 4000 to 5000 L, from 4500 to 5000 L, from 0.01 L to 1000 L, from 0.01 to 500 L, from 0.01 to 100 L, from 0.01 to 40 L, from 15 to 2000 L, from 40 to 1000 L, from 100 to 500 L, from 200 to 400 L, or any integer or culture size therebetween.

[0289] The RNA effector molecule(s) can be added during any phase of cell growth including, but not limited to, lag phase, stationary phase, early log phase, mid-log phase, late-log phase, exponential phase, or death phase. It is preferred that the cells are contacted with the RNA effector molecules prior to their entry into the death phase. In some embodiments, such as when targeting an apoptotic pathway, it may be desired to contact the cell in an earlier growth phase such as the lag phase, early log phase, mid-log phase or late-log phase (e.g., Bax/Bak inhibition). In other embodiments, it may be desired or acceptable to inhibit target gene expression at a later phase in the cell growth cycle (e.g., late-log phase or stationary phase), for example when growth-limiting products such as lactate are formed (e.g., LDH inhibition).

[0290] As noted, the RNA effector molecules featured in the invention can be encapsulated within liposomes or can form complexes thereto, in particular to cationic liposomes. Alternatively, RNA effector molecules can be complexed to lipids, in particular to cationic lipids. Suitable fatty acids and esters include but are not limited to arachidonic acid, oleic acid, eicosanoic acid, lauric acid, caprylic acid, capric acid, myristic acid, palmitic acid, stearic acid, linoleic acid, linolenic acid, dicaprate, tricaprate, monoolein, dilaurin, glyceryl 1-monocaprate, 1-dodecylazacycloheptan-2-one, an acylcarnitine, an acylcholine, or a C₁₋₂₀ alkyl ester (e.g., isopropylmyristate IPM), monoglyceride, diglyceride, or acceptable salts thereof.

[0291] In one embodiment, a RNA effector molecules featured in the invention are fully encapsulated in the lipid formulation (e.g., to form a SPLP, pSPLP, SNALP, or other nucleic acid-lipid particle). As used herein, the term “SNALP” refers to a stable nucleic acid-lipid particle, including SPLP. As used herein, the term “SPLP” refers to a nucleic acid-lipid particle comprising plasmid DNA encapsulated within a lipid vesicle. SNALPs and SPLPs typically contain a cationic lipid, a non-cationic lipid, and a lipid that prevents aggregation of the particle (e.g., a PEG-lipid conjugate). SPLPs include “pSPLP,” which include an encapsulated condensing agent-nucleic acid complex as set forth in WO 00/03683. The particles in this embodiment typically have a mean diameter of about 50 nm to about 150 nm, or about 60 nm to about 130 nm, or about 70 nm to about 110 nm, or typically about 70 nm to about 90 nm, and are substantially nontoxic. In addition, the nucleic acids when present in the nucleic acid-lipid particles of the present invention are resistant in aqueous solution to degradation with a nuclease. Nucleic acid-lipid particles and their method of preparation are disclosed in, e.g., U.S. Pat. No. 5,976,567; U.S. Pat. No. 5,981,501; U.S. Pat. No. 6,534,484; U.S. Pat. No. 6,586,410; U.S. Pat. No. 6,815,432; WO 96/40964.

[0292] The lipid to drug ratio (mass/mass ratio) (e.g., lipid to dsRNA ratio) can be in ranges of from about 1:1 to about 50:1, from about 1:1 to about 25:1, from about 3:1 to about 15:1, from about 4:1 to about 10:1, from about 5:1 to about 9:1, or about 6:1 to about 9:1, inclusive.

[0293] A cationic lipid of the formulation may comprise at least one protonatable group having a pKa of from 4 to 15. The cationic lipid can be, for example, N,N-dioleyl-N,N-dimethylammonium chloride (DODAC), N,N-distearyl-N,N-dimethylammonium bromide (DDAB), N-(1-(2,3-dioleoyloxy)propyl)-N,N,N-trimethylammonium chloride (DOTAP), N-(1-(2,3-dioleyloxy)propyl)-N,N,N-trimethylammonium chloride (DOTMA), N,N-dimethyl-2,3-dioleyloxy)propylamine (DODMA), 1,2-DiLinoleyloxy-N,N-dimethylaminopropane (DLinDMA), 1,2-Dilinolenyloxy-N,N-dimethylaminopropane (DLenDMA), 1,2-Dilinoleylcarbamoyloxy-3-dimethylaminopropane (DLin-C-DAP), 1,2-Dilinoleyoxy-3-(dimethylamino)acetoxypropane (DLin-DAC), 1,2-Dilinoleyoxy-3-morpholinopropane (DLin-MA), 1,2-Dilinoleoyl-3-dimethylaminopropane (DLinDAP), 1,2-Dilinoleylthio-3-dimethylaminopropane (DLin-S-DMA), 1-Linoleoyl-2-linoleyloxy-3-dimethylaminopropane (DLin-2-DMAP), 1,2-Dilinoleyloxy-3-trimethylaminopropane chloride salt (DLin-TMA.Cl), 1,2-Dilinoleoyl-3-trimethylaminopropane chloride salt (DLin-TAP.Cl), 1,2-Dilinoleyloxy-3-(N-methylpiperazino)propane (DLin-MPZ), or 3-(N,N-Dilinoleylamino)-1,2-propanediol (DLinAP), 3-(N,N-Dioleylamino)-1,2-propanedio (DOAP), 1,2-Dilinoleyloxo-3-(2-N,N-dimethylamino)ethoxypropane (DLin-EG-DMA), 2,2-Dilinoleyl-4-dimethylaminomethyl-[1,3]-dioxolane (DLin-K-DMA), 2,2-Dilinoleyl-4-dimethylaminoethyl-[1,3]-dioxolane, or a mixture thereof. The cationic lipid can comprise from about 20 mol % to about 70 mol %, inclusive, or about 40 mol % to about 60 mol %, inclusive, of the total lipid present in the particle. In one embodiment, cationic lipid can be further conjugated to a ligand.

[0294] A non-cationic lipid can be an anionic lipid or a neutral lipid, such as distearoyl-phosphatidylcholine (DSPC), dioleoylphosphatidylcholine (DOPC), dipalmitoyl-phosphatidylcholine (DPPC), dioleoylphosphatidylglycerol (DOPG), dipalmitoyl-phosphatidylglycerol (DPPG), dioleoyl-phosphatidylethanolamine (DOPE), palmitoyloleoyl-phosphatidylcholine (POPC), palmitoyloleoyl-phosphatidylethanolamine (POPE), dioleoyl-phosphatidylethanolamine 4-(N-maleimidomethyl)-cyclohexane-1-carboxylate (DOPE-mal), dipalmitoyl phosphatidyl ethanolamine (DPPE), dimyristoylphosphoethanolamine (DMPE), distearoyl-phosphatidyl-ethanolamine (DSPE), 16-O-monomethyl PE, 16-O-dimethyl PE, 18-1-trans PE, 1-stearoyl-2-oleoyl-phosphatidyethanolamine (SOPE), cholesterol, or a mixture thereof. The non-cationic lipid may be from about 5 mol % to about 90 mol %, inclusive, of about 10 mol %, to about 58 mol %, inclusive, if cholesterol is included, of the total lipid present in the particle.

[0295] The lipid that inhibits aggregation of particles may be, for example, a polyethyleneglycol (PEG)-lipid including, without limitation, a PEG-diacylglycerol (DAG), a PEG-dialkyloxypropyl (DAA), a PEG-phospholipid, a PEG-ceramide (Cer), or a mixture thereof. The PEG-DAA may be, for example, a PEG-dilauryloxypropyl (Ci2), a PEG-dimyristyloxypropyl (C14), a PEG-dipalmityloxypropyl (C16), or a PEG-distearyloxypropyl (C 18). The lipid that prevents aggregation of particles may be from 0 mol % to about 20 mol % or about 2 mol % of the total lipid present in the particle. In one embodiment, PEG lipid can be further conjugated to a ligand.

[0296] In some embodiments, the nucleic acid-lipid particle further includes a steroid such as, cholesterol at, e.g., about 10 mol % to about 60 mol %, inclusive, or about 48 mol % of the total lipid present in the particle.

[0297] In one embodiment, the lipid particle comprises a steroid, a PEG lipid and a cationic lipid of formula (I):

[chemical structure]

[0298] wherein each Xa and Xb, for each occurrence, is independently C1-6 alkylene; n is 0, 1, 2, 3, 4, or 5; each R is independently H,

[chemical structure]

m is 0, 1, 2, 3 or 4; Y is absent, O, NR², or S; R¹ is alkyl alkenyl or alkynyl; each of which is optionally substituted with one or more substituents; and R² is H, alkyl alkenyl or alkynyl; each of which is optionally substituted each of which is optionally substituted with one or more substituents.

[0299] In one example, the lipidoid ND98.4HCl(MW 1487) (Formula 2), Cholesterol (Sigma-Aldrich), and PEG-Ceramide C16 (Avanti Polar Lipids) can be used to prepare lipid RNA effector molecule nanoparticles (e.g., LNP01 particles). Stock solutions of each in ethanol can be prepared as follows: ND98, 133 mg/mL; Cholesterol, 25 mg/mL, PEG-Ceramide C16, 100 mg/mL. The ND98, Cholesterol, and PEG-Ceramide C16 stock solutions can then be combined in a, e.g., 42:48:10 molar ratio. The combined lipid solution can be mixed with aqueous RNA effector molecule (e.g., in sodium acetate pH 5) such that the final ethanol concentration is about 35% to 45% and the final sodium acetate concentration is about 100 mM to 300 mM, inclusive. Lipid RNA effector molecule nanoparticles typically form spontaneously upon mixing. Depending on the desired particle size distribution, the resultant nanoparticle mixture can be extruded through a polycarbonate membrane (e.g., 100 nm cut-off) using, for example, a thermobarrel extruder, such as Lipex Extruder (Northern Lipids, Inc). In some cases, the extrusion step can be omitted. Ethanol removal and simultaneous buffer exchange can be accomplished by, for example, dialysis or tangential flow filtration. Buffer can be exchanged with, for example, phosphate buffered saline (PBS) at about pH 7, e.g., about pH 6.9, about pH 7.0, about pH 7.1, about pH 7.2, about pH 7.3, or about pH 7.4.

[chemical structure]

[0300] LNP01 formulations are described elsewhere, e.g., WO 2008/042973. Formulations prepared by either the standard or extrusion-free method can be characterized in similar manners. For example, formulations are typically characterized by visual inspection. They should be whitish translucent solutions free from aggregates or sediment. Particle size and particle size distribution of lipid-nanoparticles can be measured by light scattering using, for example, a Malvern Zetasizer Nano ZS (Malvern, USA). Particles should be about 20-300 nm, such as 40-100 nm in size. The particle size distribution should be unimodal. The total sRNA effector molecule concentration in the formulation, as well as the entrapped fraction, is estimated using a dye exclusion assay. A sample of the formulated RNA effector molecule can be incubated with an RNA-binding dye, such as Ribogreen (Molecular Probes) in the presence or absence of a formulation disrupting surfactant, e.g., 0.5% Triton-X100. The total RNA effector molecule in the formulation can be determined by the signal from the sample containing the surfactant, relative to a standard curve. The entrapped fraction is determined by subtracting the “free” RNA effector molecule content (as measured by the signal in the absence of surfactant) from the total RNA effector molecule content. Percent entrapped RNA effector molecule is typically >85%. For lipid nanoparticle formulation, the particle size is at least 30 nm, at least 40 nm, at least 50 nm, at least 60 nm, at least 70 nm, at least 80 nm, at least 90 nm, at least 100 nm, at least 110 nm, or at least 120 nm. The suitable range is typically about at least 50 nm to about at least 110 nm, about at least 60 nm to about at least 100 nm, or about at least 80 nm to about at least 90 nm, inclusive.

[0301] In some embodiments, RNA effector molecules featured in the invention are formulated in conjunction with one or more penetration enhancers, surfactants and/or chelators. Suitable surfactants include fatty acids and/or esters or salts thereof, bile acids and/or salts thereof. Suitable bile acids/salts include chenodeoxycholic acid (CDCA) and ursodeoxychenodeoxycholic acid (UDCA), cholic acid, dehydrocholic acid, deoxycholic acid, glucholic acid, glycholic acid, glycodeoxycholic acid, taurocholic acid, taurodeoxycholic acid, sodium tauro-24,25-dihydro-fusidate and sodium glycodihydrofusidate. Suitable fatty acids include arachidonic acid, undecanoic acid, oleic acid, lauric acid, caprylic acid, capric acid, myristic acid, palmitic acid, stearic acid, linoleic acid, linolenic acid, dicaprate, tricaprate, monoolein, dilaurin, glyceryl 1-monocaprate, 1-dodecylazacycloheptan-2-one, an acylcarnitine, an acylcholine, or a monoglyceride, a diglyceride or a pharmaceutically acceptable salt thereof (e.g., sodium). In some embodiments, combinations of penetration enhancers are used, for example, fatty acids/salts in combination with bile acids/salts. One exemplary combination is the sodium salt of lauric acid, capric acid and UDCA. Further penetration enhancers include polyoxyethylene-9-lauryl ether, polyoxyethylene-20-cetyl ether.

[0302] The compositions of the present invention may also be formulated as suspensions in aqueous, non-aqueous or mixed media. Aqueous suspensions may further contain substances which increase the viscosity of the suspension including, for example, sodium carboxymethylcellulose, sorbitol and/or dextran. The suspension may also contain stabilizers.

[0303] The compositions of the present invention may be prepared and formulated as emulsions. Emulsions are typically heterogenous systems of one liquid dispersed in another in the form of droplets usually exceeding 0.1 μm in diameter. See, e.g., Ansel's PHARM. DOSAGE FORMS & DRUG DELIV. SYS. (8th ed. Allen et al., eds., Lippincott Williams & Wilkins, NY, 2004); Idson, in 1 PHARM. DOSAGE FORMS 199 (Lieberman et al., eds., Marcel Dekker, Inc., NY, 1988); Rosoff, in 1 PHARM. DOSAGE FORMS 245 (Lieberman et al., eds., Marcel Dekker, Inc., NY, 1988); Block in 2 PHARM. DOSAGE FORMS 335 (Lieberman et al., eds., Marcel Dekker, Inc., NY, 1988); Higuchi et al., in REMINGTON'S PHARM. SCI. 301 (Mack Publishing Co., Easton, Pa., 1985). Emulsions are often biphasic systems comprising two immiscible liquid phases intimately mixed and dispersed with each other.

[0304] In general, emulsions may be of either the water-in-oil (w/o) or the oil-in-water (o/w) variety. When an aqueous phase is finely divided into and dispersed as minute droplets into a bulk oily phase, the resulting composition is called a water-in-oil (w/o) emulsion. Alternatively, when an oily phase is finely divided into and dispersed as minute droplets into a bulk aqueous phase, the resulting composition is called an oil-in-water (o/w) emulsion. Emulsions may contain additional components in addition to the dispersed phases, and the active drug which may be present as a solution in either the aqueous phase, oily phase or itself as a separate phase. Pharmaceutical excipients such as emulsifiers, stabilizers, dyes, and anti-oxidants may also be present in emulsions as needed. Pharmaceutical emulsions may also be multiple emulsions that are comprised of more than two phases such as, for example, in the case of oil-in-water-in-oil (o/w/o) and water-in-oil-in-water (w/o/w) emulsions. Such complex formulations often provide certain advantages that simple binary emulsions do not. Multiple emulsions in which individual oil droplets of an o/w emulsion enclose small water droplets constitute a w/o/w emulsion. Likewise a system of oil droplets enclosed in globules of water stabilized in an oily continuous phase provides an o/w/o emulsion.

[0305] Emulsions are characterized by little or no thermodynamic stability. Often, the dispersed or discontinuous phase of the emulsion is well dispersed into the external or continuous phase and maintained in this form through the means of emulsifiers or the viscosity of the formulation. Either of the phases of the emulsion may be a semisolid or a solid, as is the case of emulsion-style ointment bases and creams. Other means of stabilizing emulsions entail the use of emulsifiers that may be incorporated into either phase of the emulsion. Emulsifiers may broadly be classified into four categories: synthetic surfactants, naturally occurring emulsifiers, absorption bases, and finely dispersed solids. See, e.g., ANSEL'S PHARM. DOSAGE FORMS & DRUG DELIV. SYS., 2004; Idson, in PHARM. DOSAGE FORMS, 1988.

[0306] Synthetic surfactants, also known as surface active agents, have found wide applicability in the formulation of emulsions and have been reviewed in the literature. See, e.g., ANSEL'S PHARM. DOSAGE FORMS & DRUG DELIV. SYS., 2004; Idson, in PHARM. DOSAGE FORMS, 1988; Rieger, in PHARM. DOSAGE FORMS, 1988. Surfactants are typically amphiphilic and comprise a hydrophilic and a hydrophobic portion. The ratio of the hydrophilic to the hydrophobic nature of the surfactant has been termed the hydrophile/lipophile balance (HLB) and is a valuable tool in categorizing and selecting surfactants in the preparation of formulations. Surfactants may be classified into different classes based on the nature of the hydrophilic group: nonionic, anionic, cationic and amphoteric. See, e.g., ANSEL'S PHARM. DOSAGE FORMS & DRUG DELIV. SYS., 2004; Idson, in PHARM. DOSAGE FORMS, 1988; Rieger, in PHARM. DOSAGE FORMS, 1988.

[0307] Naturally occurring emulsifiers used in emulsion formulations include lanolin, beeswax, phosphatides, lecithin and acacia. Absorption bases possess hydrophilic properties such that they can soak up water to form w/o emulsions yet retain their semisolid consistencies, such as anhydrous lanolin and hydrophilic petrolatum. Finely divided solids have also been used as good emulsifiers especially in combination with surfactants and in viscous preparations. These include polar inorganic solids, such as heavy metal hydroxides, nonswelling clays such as bentonite, attapulgite, hectorite, kaolin, montmorillonite, colloidal aluminum silicate and colloidal magnesium aluminum silicate, pigments and nonpolar solids such as carbon or glyceryl tristearate

[0308] A large variety of non-emulsifying materials are also included in emulsion formulations and contribute to the properties of emulsions. These include fats, oils, waxes, fatty acids, fatty alcohols, fatty esters, humectants, hydrophilic colloids, preservatives and antioxidants. Block, in 1 PHARM. DOSAGE FORMS 335 (Lieberman et al., eds., Marcel Dekker, Inc., NY, 1988); Idson, in PHARM. DOSAGE FORMS (1988).

[0309] Hydrophilic colloids or hydrocolloids include naturally occurring gums and synthetic polymers such as polysaccharides (for example, acacia, agar, alginic acid, carrageenan, guar gum, karaya gum, and tragacanth), cellulose derivatives (for example, carboxymethylcellulose and carboxypropylcellulose), and synthetic polymers (for example, carbomers, cellulose ethers, and carboxyvinyl polymers). These disperse or swell in water to form colloidal solutions that stabilize emulsions by forming strong interfacial films around the dispersed-phase droplets and by increasing the viscosity of the external phase.

[0310] Because emulsions often contain a number of ingredients such as carbohydrates, proteins, sterols and phosphatides that may readily support the growth of microbes, these formulations often incorporate preservatives. Commonly used preservatives included in emulsion formulations include methyl paraben, propyl paraben, quaternary ammonium salts, benzalkonium chloride, esters of p-hydroxybenzoic acid, and boric acid. Antioxidants are also commonly added to emulsion formulations to prevent deterioration of the formulation. Antioxidants used may be free radical scavengers such as tocopherols, alkyl gallates, butylated hydroxyanisole, butylated hydroxytoluene, or reducing agents such as ascorbic acid and sodium metabisulfite, and antioxidant synergists such as citric acid, tartaric acid, and lecithin.

[0311] In one embodiment, the compositions of RNA effector molecules and nucleic acids are formulated as microemulsions. A microemulsion may be defined as a system of water, oil and amphiphile which is a single optically isotropic and thermodynamically stable liquid solution. See, e.g., ANSEL'S PHARM. DOSAGE FORMS & DRUG DELIV. SYS. (8th ed., Allen et al, eds., Lippincott Williams & Wilkins, NY, 2004); Rosoff, in PHARM. DOSAGE FORMS, 1988. Typically, microemulsions are systems that are prepared by first dispersing an oil in an aqueous surfactant solution and then adding a sufficient amount of a fourth component, generally an intermediate chain-length alcohol to form a transparent system. Therefore, microemulsions have also been described as thermodynamically stable, isotropically clear dispersions of two immiscible liquids that are stabilized by interfacial films of surface-active molecules. Leung & Shah, in CONTROLLED RELEASE DRUGS: POLYMERS & AGGREGATE SYS. 185-215 (Rosoff, ed., VCH Publishers, NY, 1989). Microemulsions commonly are prepared via a combination of three to five components that include oil, water, surfactant, cosurfactant and electrolyte. Whether the microemulsion is of the water-in-oil (w/o) or an oil-in-water (o/w) type is dependent on the properties of the oil and surfactant used and on the structure and geometric packing of the polar heads and hydrocarbon tails of the surfactant molecules. Schott, in REMINGTON'S PHARM. SCI. 271 (1985).

[0312] The phenomenological approach utilizing phase diagrams has been extensively studied and has yielded a comprehensive knowledge, to one skilled in the art, of how to formulate microemulsions. See, e.g., ANSEL'S PHARM. DOSAGE FORMS & DRUG DELIV. SYS. (8th ed., Allen et al, eds., Lippincott Williams & Wilkins, NY, 2004); Rosoff, 1988; Block, 1988. Compared to conventional emulsions, microemulsions offer the advantage of solubilizing water-insoluble drugs in a formulation of thermodynamically stable droplets that are formed spontaneously.

[0313] Surfactants used in the preparation of microemulsions include, but are not limited to, ionic surfactants, non-ionic surfactants, Brij 96, polyoxyethylene oleyl ethers, polyglycerol fatty acid esters, tetraglycerol monolaurate (ML310), tetraglycerol monooleate (MO310), hexaglycerol monooleate (PO310), hexaglycerol pentaoleate (PO500), decaglycerol monocaprate (MCA750), decaglycerol monooleate (MO750), decaglycerol sequioleate (SO750), decaglycerol decaoleate (DAO750), alone or in combination with cosurfactants. The cosurfactant, usually a short-chain alcohol such as ethanol, 1-propanol, and 1-butanol, serves to increase the interfacial fluidity by penetrating into the surfactant film and consequently creating a disordered film because of the void space generated among surfactant molecules. Microemulsions may, however, be prepared without the use of cosurfactants and alcohol-free self-emulsifying microemulsion systems are known in the art. The aqueous phase may typically be, but is not limited to, water, an aqueous solution of the drug, glycerol, PEG300, PEG400, polyglycerols, propylene glycols, and derivatives of ethylene glycol. The oil phase may include, but is not limited to, materials such as Captex 300, Captex 355, Capmul MCM, fatty acid esters, medium chain (C8-C12) mono, di, and tri-glycerides, polyoxyethylated glyceryl fatty acid esters, fatty alcohols, polyglycolized glycerides, saturated polyglycolized C8-C10 glycerides, vegetable oils and silicone oil.

[0314] Microemulsions afford advantages of better drug solubilization, protection of drug from enzymatic hydrolysis, possible enhancement of drug absorption due to surfactant-induced alterations in membrane fluidity and permeability, ease of preparation, and decreased toxicity. See, e.g., U.S. Pat. No. 6,191,105; U.S. Pat. No. 7,063,860; U.S. Pat. No. 7,070,802; U.S. Pat. No. 7,157,099; Constantinides et al., 11 Pharm. Res. 1385 (1994); Ho et al., 85 J. Pharm. Sci. 138-43 (1996). Often, microemulsions may form spontaneously when their components are brought together at ambient temperature. This may be particularly advantageous when formulating thermolabile drugs, peptides or RNA effector molecules.

[0315] Microemulsions of the present invention may also contain additional components and additives such as sorbitan monostearate (Grill 3), Labrasol, and penetration enhancers to improve the properties of the formulation and to enhance the absorption of the RNA effector molecules and nucleic acids of the present invention. Penetration enhancers used in the microemulsions of the present invention may be classified as belonging to one of five broad categories—surfactants, fatty acids, bile salts, chelating agents, and non-chelating non-surfactants. Lee et al., Crit. Rev. Therapeutic Drug Carrier Sys. 92 (1991).

[0316] There are many organized surfactant structures besides microemulsions that have been studied and used for the formulation of drugs. These include monolayers, micelles, bilayers and vesicles. Vesicles, such as liposomes, have attracted great interest because of their specificity and the duration of action they offer from the standpoint of drug delivery. As used in the present invention, the term “liposome” means a vesicle composed of amphiphilic lipids arranged in a spherical bilayer or bilayers.

[0317] Liposomes are unilamellar or multilamellar vesicles which have a membrane formed from a lipophilic material and an aqueous interior. The aqueous portion contains the composition to be delivered. Cationic liposomes possess the advantage of being able to fuse to the cell wall. Non-cationic liposomes, although not able to fuse as efficiently with the cell wall, are taken up by macrophages in vivo. In order to cross intact cell membranes, lipid vesicles must pass through a series of fine pores, each with a diameter less than 50 nm, under the influence of a suitable transdermal gradient. Therefore, it is desirable to use a liposome which is highly deformable and able to pass through such fine pores.

[0318] Further advantages of liposomes include: liposomes obtained from natural phospholipids are biocompatible and biodegradable; liposomes can incorporate a wide range of water and lipid soluble drugs; and liposomes can protect encapsulated drugs in their internal compartments from metabolism and degradation. See, e.g., Wang et al., DRUG DELIV. PRINCIPLES & APPL. (John Wiley & Sons, Hoboken, N.J., 2005); Rosoff, 1988. Important considerations in the preparation of liposome formulations are the lipid surface charge, vesicle size and the aqueous volume of the liposomes.

[0319] Liposomes are useful for the transfer and delivery of active ingredients to the site of action. Because the liposomal membrane is structurally similar to biological membranes, when liposomes are applied to a tissue, the liposomes start to merge with the cellular membranes and as the merging of the liposome and cell progresses, the liposomal contents are emptied into the cell where the active agent may act. Liposomal formulations have been the focus of extensive investigation as the mode of delivery for many drugs. There is growing evidence that for topical administration, liposomes present several advantages over other formulations. Such advantages include reduced side-effects related to high systemic absorption of the administered drug, increased accumulation of the administered drug at the desired target, and the ability to administer a wide variety of drugs, both hydrophilic and hydrophobic, into the skin.

[0320] Liposomes fall into two broad classes. Cationic liposomes are positively charged liposomes which interact with the negatively charged polynucleotide molecules to form a stable complex. The positively charged polynucleotide/liposome complex binds to the negatively charged cell surface and is internalized in an endosome. Due to the acidic pH within the endosome, the liposomes are ruptured, releasing their contents into the cell cytoplasm. Wang et al., 147 Biochem. Biophys. Res. Commun. 980-85 (1987).

[0321] Liposomes which are pH-sensitive or negatively-charged, entrap polynucleotide rather than complex with it. Because both the polynucleotide and the lipid are similarly charged, repulsion rather than complex formation occurs. Nevertheless, some polynucleotide is entrapped within the aqueous interior of these liposomes. pH-sensitive liposomes have been used to deliver DNA encoding the thymidine kinase gene to cell monolayers in culture. Expression of the exogenous gene was detected in the target cells. Zhou et al., 19 J. Controlled Rel. 269-74 (1992).

[0322] One major type of liposomal composition includes phospholipids other than naturally-derived phosphatidylcholine. Neutral liposome compositions, for example, can be formed from dimyristoyl phosphatidylcholine (DMPC) or dipalmitoyl phosphatidylcholine (DPPC). Anionic liposome compositions generally are formed from dimyristoyl phosphatidylglycerol, while anionic fusogenic liposomes are formed primarily from dioleoyl phosphatidylethanolamine (DOPE). Another type of liposomal composition is formed from phosphatidylcholine (PC) such as, for example, soybean PC, and egg PC. Another type is formed from mixtures of phospholipid and/or phosphatidylcholine and/or cholesterol.

[0323] Liposomes also include “sterically stabilized” liposomes, a term which, as used herein, refers to liposomes comprising one or more specialized lipids that, when incorporated into liposomes, result in enhanced circulation lifetimes relative to liposomes lacking such specialized lipids. Examples of sterically stabilized liposomes are those in which part of the vesicle-forming lipid portion of the liposome (A) comprises one or more glycolipids, such as monosialoganglioside GM1, or (B) is derivatized with one or more hydrophilic polymers, such as a polyethylene glycol (PEG) moiety. While not wishing to be bound by any particular theory, it is thought in the art that, at least for sterically stabilized liposomes containing gangliosides, sphingomyelin, or PEG-derivatized lipids, the enhanced circulation half-life of these sterically stabilized liposomes derives from a reduced uptake into cells of the reticuloendothelial system (RES). Allen et al., 223 FEBS Lett. 42 (1987); Wu et al., 53 Cancer Res. 3765 (1993).

[0324] Various liposomes comprising one or more glycolipids are known in the art. Papahadjopoulos et al. (507 Ann. N.Y. Acad. Sci. 64 (1987)), reported the ability of monosialoganglioside GM1, galactocerebroside sulfate and phosphatidylinositol to improve blood half-lives of liposomes. These findings were expounded upon by Gabizon et al. (85 PNAS 6949 (1988)). U.S. Pat. No. 4,837,028 and WO 88/04924, both to Allen et al., disclose liposomes comprising (1) sphingomyelin and (2) the ganglioside GM1 or a galactocerebroside sulfate ester. U.S. Pat. No. 5,543,152 (Webb et al.) discloses liposomes comprising sphingomyelin. Liposomes comprising 1,2-sn-dimyristoylphosphatidylcholine are disclosed in WO 97/13499 (Lim et al.).

[0325] Many liposomes comprising lipids derivatized with one or more hydrophilic polymers, and methods of preparation thereof, are known in the art. Sunamoto et al. (53 Bull. Chem. Soc. Jpn. 2778 (1980)) described liposomes comprising a nonionic detergent, 2C1215G, that contains a PEG moiety. Illum et al. (167 FEBS Lett. 79 (1984)), noted that hydrophilic coating of polystyrene particles with polymeric glycols results in significantly enhanced blood half-lives. Synthetic phospholipids modified by the attachment of carboxylic groups of polyalkylene glycols (e.g., PEG) are described by Sears (U.S. Pat. No. 4,426,330 and No. 4,534,899). In addition, antibodies can be conjugated to a polyakylene derivatized liposome (see e.g., PCT Application US 2008/0014255). Klibanov et al. (268 FEBS Lett. 235 (1990)), described experiments demonstrating that liposomes comprising phosphatidylethanolamine (PE) derivatized with PEG or PEG stearate have significant increases in blood circulation half-lives. Blume et al. (1029 Biochim. Biophys. Acta 1029, (1990)), extended such observations to other PEG-derivatized phospholipids, e.g., DSPE-PEG, formed from the combination of distearoylphosphatidylethanolamine (DSPE) and PEG. Liposomes having covalently bound PEG moieties on their external surface are described in European Patent No. 0 445 131 B1 and

[0326] Liposome compositions containing 1-20 mole percent of PE derivatized with PEG, and methods of use thereof, are described by Woodle et al. (U.S. Pat. No. 5,013,556; No. 5,356,633) and Martin et al. (U.S. Pat. No. 5,213,804; European Patent No. 0 496813 B1). Liposomes comprising a number of other lipid-polymer conjugates are disclosed in WO 91/05545 and U.S. Pat. No. 5,225,212 and in WO 94/20073. Liposomes comprising PEG-modified ceramide lipids are described in WO 96/10391. U.S. Pat. No. 5,540,935 and U.S. Pat. No. 5,556,948 describe PEG-containing liposomes that can be further derivatized with functional moieties on their surfaces. Methods and compositions relating to liposomes comprising PEG can be found in, e.g., U.S. Pat. No. 6,049,094; U.S. Pat. No. 6,224,903; U.S. Pat. No. 6,270,806; U.S. Pat. No. 6,471,326; U.S. Pat. No. 6,958,241.

[0327] As noted above, liposomes may optionally be prepared to contain surface groups, such as antibodies or antibody fragments, small effector molecules for interacting with cell-surface receptors, antigens, and other like compounds, and these groups can facilitate delivery of liposomes and their contents to specific cell populations. Such ligands can be included in the liposomes by including in the liposomal lipids a lipid derivatized with the targeting molecule, or a lipid having a polar-head chemical group that can be derivatized with the targeting molecule in preformed liposomes. Alternatively, a targeting moiety can be inserted into preformed liposomes by incubating the preformed liposomes with a ligand-polymer-lipid conjugate.

[0328] Lipids can be derivatized using a variety of targeting moieties, such as ligands, cell surface receptors, glycoproteins, vitamins (e.g., riboflavin) and monoclonal antibodies by covalently attaching the ligand to the free distal end of a hydrophilic polymer chain, which is attached at its proximal end to a vesicle-forming lipid. There are a wide variety of techniques for attaching a selected hydrophilic polymer to a selected lipid and activating the free, unattached end of the polymer for reaction with a selected ligand, and as noted above, the hydrophilic polymer polyethyleneglycol (PEG) has been studied widely. Allen et al., 1237 Biochem. Biophys. Acta 99-108 (1995); Zalipsky, 4 Bioconj. Chem. 296-99 (1993); Zalipsky et al., 353 FEBS Lett. 1-74 (1994); Zalipsky et al., Bioconj. Chem. 705-08 (1995); Zalipsky, in STEALTH LIPOSOMES (Lasic & Martin, eds. CRC Press, Boca Raton, Fla., 1995).

[0329] A number of liposomes comprising nucleic acids are known in the art, such as methods for encapsulating high molecular weight nucleic acids in liposomes. WO 96/40062. U.S. Pat. No. 5,264,221 to Tagawa et al. discloses protein-bonded liposomes and asserts that the contents of such liposomes may include a dsRNA. U.S. Pat. No. 5,665,710 to Rahman et al. describes certain methods of encapsulating oligodeoxynucleotides in liposomes. WO 97/04787 to Love et al. discloses liposomes comprising dsRNAs targeted to the raf gene. In addition, methods for preparing a liposome composition comprising a nucleic acid can be found in, e.g., U.S. Pat. No. 6,011,020; U.S. Pat. No. 6,074,667; U.S. Pat. No. 6,110,490; U.S. Pat. No. 6,147,204; U.S. Pat. No. 6,271,206; U.S. Pat. No. 6,312,956; U.S. Pat. No. 6,465,188; U.S. Pat. No. 6,506,564; U.S. Pat. No. 6,750,016; U.S. Pat. No. 7,112,337.

[0330] Transfersomes are yet another type of liposomes, and are highly deformable lipid aggregates which are attractive candidates for drug delivery vehicles. Transfersomes may be described as lipid droplets which are so highly deformable that they are easily able to penetrate through pores which are smaller than the droplet. Transfersomes are adaptable to the environment in which they are used, e.g., they are self-optimizing, self-repairing, frequently reach their targets without fragmenting, and often self-loading. To make transfersomes it is possible to add surface edge-activators, usually surfactants, to a standard liposomal composition.

[0331] Surfactants find wide application in formulations such as emulsions (including microemulsions) and liposomes. The most common way of classifying and ranking the properties of the many different types of surfactants, both natural and synthetic, is by the use of the hydrophile/lipophile balance (HLB). The nature of the hydrophilic group (also known as the “head”) provides the most useful means for categorizing the different surfactants used in formulations. See e.g., Malmsten, SURFACTANTS & POLYMERS IN DRUG DELIV. (Informa Health Care, NY, 2002); Rieger, in PHARM. DOSAGE FORMS 285 (Marcel Dekker, Inc., NY, 1988).

[0332] If the surfactant molecule is not ionized, it is classified as a nonionic surfactant. Nonionic surfactants find wide application in pharmaceutical and cosmetic products and are usable over a wide range of pH values. In general their HLB values range from 2 to about 18 depending on their structure. Nonionic surfactants include nonionic esters such as ethylene glycol esters, propylene glycol esters, glyceryl esters, polyglyceryl esters, sorbitan esters, sucrose esters, and ethoxylated esters. Nonionic alkanolamides and ethers such as fatty alcohol ethoxylates, propoxylated alcohols, and ethoxylated/propoxylated block polymers are also included in this class. The polyoxyethylene surfactants are the most popular members of the nonionic surfactant class.

[0333] If the surfactant molecule carries a negative charge when it is dissolved or dispersed in water, the surfactant is classified as anionic. Anionic surfactants include carboxylates such as soaps, acyl lactylates, acyl amides of amino acids, esters of sulfuric acid such as alkyl sulfates and ethoxylated alkyl sulfates, sulfonates such as alkyl benzene sulfonates, acyl isethionates, acyl taurates and sulfosuccinates, and phosphates. The most important members of the anionic surfactant class are the alkyl sulfates and the soaps.

[0334] If the surfactant molecule carries a positive charge when it is dissolved or dispersed in water, the surfactant is classified as cationic. Cationic surfactants include quaternary ammonium salts and ethoxylated amines. The quaternary ammonium salts are the most used members of this class. If the surfactant molecule has the ability to carry either a positive or negative charge, the surfactant is classified as amphoteric. Amphoteric surfactants include acrylic acid derivatives, substituted alkylamides, N-alkylbetaines and phosphatides.

[0335] In one embodiment, the present invention employs various penetration enhancers to effect the efficient delivery of nucleic acids, particularly RNA effector molecules, to the cell. Most drugs are present in solution in both ionized and nonionized forms. Usually, only lipid soluble or lipophilic drugs readily cross cell membranes. It has been discovered that even non-lipophilic drugs may cross cell membranes if the membrane to be crossed is treated with a penetration enhancer. In addition to aiding the diffusion of non-lipophilic drugs across cell membranes, penetration enhancers also enhance the permeability of lipophilic drugs.

[0336] Penetration enhancers may be classified as belonging to one of five broad categories: surfactants, fatty acids, bile salts, chelating agents, and non-chelating non-surfactants. See, e.g., Malmsten, 2002; Lee et al., Crit. Rev. Therapeutic Drug Carrier Sys. 92 (1991).

[0337] In connection with the present invention, penetration enhancers include surfactants (or “surface-active agents”), which are chemical entities that, when dissolved in an aqueous solution, reduce the surface tension of the solution or the interfacial tension between the aqueous solution and another liquid, with the result that absorption of RNA effector molecules through cellular membranes and other biological barriers is enhanced. In addition to bile salts and fatty acids, these penetration enhancers include, for example, sodium lauryl sulfate, polyoxyethylene-9-lauryl ether and polyoxyethylene-20-cetyl ether) (see, e.g., Malmsten, 2002; Lee et al., 1991); and perfluorochemical emulsions, such as FC-43 (Takahashi et al., 40 J. Pharm. Pharmacol. 252 (1988)).

[0338] Various fatty acids and their derivatives which act as penetration enhancers include, for example, oleic acid, lauric acid, capric acid (n-decanoic acid), myristic acid, palmitic acid, stearic acid, linoleic acid, linolenic acid, dicaprate, tricaprate, monoolein (1-monooleoyl-rac-glycerol), dilaurin, caprylic acid, arachidonic acid, glycerol 1-monocaprate, 1-dodecylazacyclo-heptan-2-one, acylcarnitines, acylcholines, C1-20 alkyl esters thereof (e.g., methyl, isopropyl and t-butyl), and mono- and di-glycerides thereof (i.e., oleate, laurate, caprate, myristate, palmitate, stearate, linoleate, etc.). See, e.g., Touitou et al., ENHANCEMENT IN DRUG DELIV. (CRC Press, Danvers, Mass., 2006); Lee et al., 1991; Muranishi, 7 Crit. Rev. Therapeutic Drug Carrier Sys. 1-33 (1990); El Hariri et al., 44 J. Pharm. Pharmacol. 651-54 (1992).

[0339] The physiological role of bile includes the facilitation of dispersion and absorption of lipids and fat-soluble vitamins. See, e.g., Malmsten, 2002; Brunton, Chapt. 38 in GOODMAN & GILMAN'S PHARMACOLOGICAL BASIS THERAPEUTICS, 9TH ED. 934-35 (Hardman et al., eds., McGraw-Hill, NY, 1996). Various natural bile salts, and their synthetic derivatives, act as penetration enhancers. Thus the term “bile salts” includes any of the naturally occurring components of bile as well as any of their synthetic derivatives. Suitable bile salts include, for example, cholic acid (or its pharmaceutically acceptable sodium salt, sodium cholate), dehydrocholic acid (sodium dehydrocholate), deoxycholic acid (sodium deoxycholate), glucholic acid (sodium glucholate), glycholic acid (sodium glycocholate), glycodeoxycholic acid (sodium glycodeoxycholate), taurocholic acid (sodium taurocholate), taurodeoxycholic acid (sodium taurodeoxycholate), chenodeoxycholic acid (sodium chenodeoxycholate), ursodeoxycholic acid (UDCA), sodium tauro-24,25-dihydro-fusidate (STDHF), sodium glycodihydrofusidate and polyoxyethylene-9-lauryl ether (POE) (see e.g., Malmsten, 2002; Lee et al., 1991; Swinyard, Chapt. 39 in REMINGTON'S PHARM. SCI., 18th Ed. 782-83 (Gennaro, ed., Mack Publishing Co., Easton, Pa., 1990); Muranishi, 1990; Yamamoto et al., 263 J. Pharm. Exp. Ther. 25 (1992); Yamashita et al., 79 J. Pharm. Sci. 579-83 (1990).

[0340] Chelating agents, as used in connection with the present invention, can be defined as compounds that remove metallic ions from solution by forming complexes therewith, with the result that absorption of RNA effector molecules through the mucosa is enhanced. With regards to their use as penetration enhancers in the present invention, chelating agents have the added advantage of also serving as DNase inhibitors, as most characterized DNA nucleases require a divalent metal ion for catalysis and are thus inhibited by chelating agents. Jarrett, 618 J. Chromatogr. 315-39 (1993). Suitable chelating agents include but are not limited to disodium ethylenediaminetetraacetate (EDTA), citric acid, salicylates (e.g., sodium salicylate, 5-methoxysalicylate and homovanilate), N-acyl derivatives of collagen, laureth-9 and N-amino acyl derivatives of beta-diketones (enamines). See, e.g., Katdare et al., EXCIPIENT DEVEL. PHARM. BIOTECH. & DRUG DELIV. (CRC Press, Danvers, Mass., 2006); Lee et al., 1991; Muranishi, 1990; Buur et al., 14 J. Control Rel. 43-51 (1990).

[0341] As used herein, non-chelating non-surfactant penetration enhancing compounds can be defined as compounds that demonstrate insignificant activity as chelating agents or as surfactants but that nonetheless enhance absorption of RNA effector molecules through the alimentary mucosa. See e.g., Muranishi, 1990. This class of penetration enhancers include, for example, unsaturated cyclic ureas, 1-alkyl- and 1-alkenylazacyclo-alkanone derivatives (Lee et al., 1991); and non-steroidal anti-inflammatory agents such as diclofenac sodium, indomethacin and phenylbutazone (Yamashita et al., 1987).

[0342] Agents that enhance uptake of RNA effector molecules at the cellular level may also be added to the pharmaceutical and other compositions of the present invention. For example, cationic lipids, such as lipofectin (U.S. Pat. No. 5,705,188), cationic glycerol derivatives, and polycationic molecules, such as polylysine (WO 97/30731), are also known to enhance the cellular uptake of dsRNAs. Examples of commercially available transfection reagents include, for example LIPOFECTAMINE™ (Invitrogen; Carlsbad, Calif.), LIPOFECTAMINE 2000™ (Invitrogen; Carlsbad, Calif.), 293 FECTIN™ (Invitrogen), CELLFECTIN™ (Invitrogen), DMRIE-C™ (Invitrogen), FREESTYLE™ MAX (Invitrogen), LIPOFECTAMINE™ 2000 CD (Invitrogen), LIPOFECTAMINE™ (Invitrogen), RNAiMAX (Invitrogen), OLIGOFECTAMINE™ (Invitrogen), and OPTIFECT™ (Invitrogen) transfection reagents; and X-tremeGENE Q2 Transfection Reagent (Roche Applied Science; Grenzacherstrasse, Switzerland), DOTAP Liposomal Transfection Reagent (Avante Polar Lipids, Inc., Alabaster, Ala.), DOSPER Liposomal Transfection Reagent (Roche), or FuGENE® (Promega; Madison, Wis.) or TRANSFECTAM® Reagent (Promega), TRANSFAST™ Transfection Reagent (Promega), TFX™-20 Reagent (Promega), TFX™-50 Reagent (Promega); DREAMFECT™ (OZ Biosciences; Marseille, France), EcoTransfect (OZ Biosciences); TRANSPASS® D1 Transfection Reagent (New England Biolabs; Ipswich, Mass.); LYOVEC™/LIPOGENT™ (InvivoGen; San Diego, Calif.); PerFectin Transfection Reagent (Genlantis; San Diego, Calif.), NEUROPORTER Transfection Reagent (Genlantis), GENEPORTER Transfection reagent (Genlanti), GENEPORTER 2 Transfection reagent (Genlantis), CYTOFECTIN Transfection Reagent (Genlantis), BACULOPORTER Transfection Reagent (Genlantis), TROGANPORTERT™ transfection reagent (Genlantis); RIBOFECT (Bioline; Taunton, Mass., U.S.), PLASFECT (Bioline), UNIFECTOR (B-Bridge International; Mountain View, Calif.), SUREFECTOR (B-Bridge International), or HIFECT™ (B-Bridge Int'l), among others.

[0343] Other agents can be utilized to enhance the penetration of the administered nucleic acids, including glycols such as ethylene glycol and propylene glycol, pyrrols such as 2-pyrrol, azones, and terpenes such as limonene and menthone.

[0344] Certain compositions of the present invention also incorporate carrier compounds in the formulation. As used herein, “carrier compound” or “carrier” can refer to a nucleic acid, or analog thereof, which is inert (i.e., does not possess biological activity per se) but is recognized as a nucleic acid by in vivo processes that reduce the bioavailability of a nucleic acid having biological activity by, for example, degrading the biologically active nucleic acid or promoting its removal.

[0345] The compositions of the present invention can additionally contain other adjunct components so long as such materials, when added, do not unduly interfere with the biological activities of the components of the compositions of the present invention. The formulations can be sterilized and, if desired, mixed with auxiliary agents that do not deleteriously interact with the RNA effector molecules of the formulation.

[0346] Aqueous suspensions can contain substances which increase the viscosity of the suspension including, for example, sodium carboxymethylcellulose, sorbitol and/or dextran. The suspension can also contain stabilizers.

[0347] Toxicity and therapeutic efficacy of such compounds can be determined by standard pharmaceutical procedures in cell cultures or in cells, e.g., for determining the LD₅₀ (the dose lethal to 50% of the population) and the ED₅₀ (the dose therapeutically effective in 50% of the population). The dose ratio between toxic and therapeutic effects is the therapeutic index and it can be expressed as the ratio LD₅₀/ED₅₀. Compounds that exhibit high therapeutic indices are particularly useful. The data obtained from cell culture assays and animal studies can be used in formulating a range of dosages for use in the instant methods. The dosage of compositions featured in the invention lies generally within a range of concentrations that includes the ED₅₀ with little or no toxicity. The dosage can vary within this range depending upon the dosage form employed and the route of administration utilized.

[0348] In yet another aspect, the invention provides a method for inhibiting the expression of a target gene in a host cell by administering a composition featured in the invention to the host cell such that expression of the target gene is decreased for an extended duration, e.g., at least two, three, four days or more, e.g., one week, two weeks, three weeks, or four weeks or longer. The effect of the decreased expression of the target gene preferably results in a decrease in levels of the protein encoded by the target gene by at least 10%, at least 15%, at least 20%, at least 25%, at least 30%, at least 40%, at least 50%, or at least 60%, or more, as compared to pretreatment levels.

[0349] In some embodiments, kits are provided for testing the effect of a RNA effector molecule or a series of RNA effector molecules on the production of an immunogenic agent by the cell, where the kits comprise a substrate having one or more assay surfaces suitable for culturing cells under conditions that allow production of an immunogenic agent. In some embodiments, the exterior of the substrate comprises wells, indentations, demarcations, or the like at positions corresponding to the assay surfaces. In some embodiments, the wells, indentations, demarcations, or the like retain fluid, such as cell culture media, over the assay surfaces.

[0350] In some embodiments, the assay surfaces on the substrate are sterile and are suitable for culturing host cells under conditions representative of the culture conditions during large-scale (e.g., industrial scale) production of the immunogenic agent. Advantageously, kits provided herein offer a rapid, cost-effective means for testing a wide-range of agents and/or conditions on the production of an immunogenic agent, allowing the cell culture conditions to be established prior to full-scale production of the immunogenic agent.

[0351] In some embodiments, one or more assay surfaces of the substrate comprise a concentrated test agent, such as a RNA effector molecule, such that the addition of suitable media to the assay surfaces results in a desired concentration of the RNA effector molecule surrounding the assay surface. In some embodiments, the RNA effector molecules can be printed or ingrained onto the assay surface, or provided in a lyophilized form, e.g., within wells, such that the effector molecules can be reconstituted upon addition of an appropriate amount of media. In some embodiments, the RNA effector molecules are reconstituted by plating cells onto assay surfaces of the substrate.

[0352] In some embodiments, kits provided herein further comprise cell culture media suitable for culturing a cell under conditions allowing for the production of an immunogenic agent of interest. The media can be in a ready to use form or can be concentrated (e.g., as a stock solution), lyophilized, or provided in another reconstitutable form.

[0353] In further embodiments, kits provided herein further comprise one or more reagents suitable for detecting production of the immunogenic agent by the cell, cell culture, or tissue culture. In further embodiments, the reagent(s) are suitable for detecting a property of the cell, such as maximum cell density, cell viability, or the like, which is indicative of production of the desired immunogenic agent. In some embodiments, the reagent(s) are suitable for detecting the immunogenic agent or a property thereof, such as the biological activity, homogeneity, or structure of the immunogenic agent.

[0354] In some embodiments, one or more assay surfaces of the substrate further comprise a carrier for which facilitates uptake of RNA effector molecules by cells. Carriers for RNA effector molecules are known in the art and are described herein. For example, in some embodiments, the carrier is a lipid formulation such as LIPOFECTAMINE™ transfection reagent (Invitrogen; Carlsbad, Calif.) or a related formulation. Examples of such carrier formulations are described herein.

[0355] In some embodiments, one or more assay surfaces of the substrate comprise a RNA effector molecule or series of RNA effector molecules and a carrier, each in concentrated form, such that plating test cells onto the assay surface(s) results in a concentration the RNA effector molecule(s) and the carrier effective for facilitating uptake of the RNA effector molecule(s) by the cells and modulation of the expression of one or more genes targeted by the RNA effector molecules.

[0356] In some embodiments, the substrate further comprises a matrix which facilitates three-dimensional (3-D) cell growth and/or production of the immunogenic agent by the cells. In further embodiments, the matrix facilitates anchorage-dependent growth of cells. Non-limiting examples of matrix materials suitable for use with various kits described herein include agar, agarose, methylcellulose, alginate hydrogel (e.g., 5% alginate +5% collagen type I), chitosan, hydroactive hydrocolloid polymer gels, polyvinyl alcohol-hydrogel (PVA-H), polylactide-co-glycolide (PLGA), collagen vitrigel, PHEMA (poly(2-hydroxylmethacrylate)) hydrogels, PVP/PEO hydrogels, BD PURAMATRIX™ hydrogels, and copolymers of 2-methacryloyloxyethyl phosphorylcholine (MPC).

[0357] In some embodiments, the substrate comprises a microarray plate, a biochip, or the like which allows for the high-throughput, automated testing of a range of test agents, conditions, and/or combinations thereof on the production of an immunogenic agent by cultured cells. For example, the substrate can comprise a 2-dimensional microarray plate or biochip having m columns and n rows of assay surfaces (e.g., residing within wells) which allow for the testing of m×n combinations of test agents and/or conditions (e.g., on a 24, 96 or 384-well microarray plate). The microarray substrates are preferably designed such that all necessary positive and negative controls can be carried out in parallel with testing of the agents and/or conditions.

[0358] In further embodiments, kits are provided comprising one or more microarray substrates seeded with a set of RNA effector molecules designed to modulate a particular pathway, function, or property of a cell which affects the production of the immunogenic agent. For example, in some embodiments, the RNA effector molecules are directed against target genes comprising a pathway involved in the expression, folding, secretion, or post-translational modification of a recombinant protein immunogenic agent by the cell.

[0359] In further embodiments, kits are provided herein comprising one or more microarray substrates seeded with a set of RNA effector molecules designed to address a particular problem or class of problems associated with the production of an immunogenic agent in cell-based systems. For example, in some embodiments, the RNA effector molecules are directed against target genes expressed by latent or endogenous viruses; or involved in cell processes, such as cell cycle progression, cell metabolism or apoptosis which inhibit or interfere production or purification of the immunogenic agent. In further embodiments, the RNA effector molecules are directed against target genes that mediate enzymatic degradation, aggregation, misfolding, or other processes that reduce the activity, homogeneity, stability, and/or other qualities of the immunogenic agent. In yet further embodiments, the effector molecules are directed against target genes that affect the infectivity of exogenous or adventitious contaminating microbes.

[0360] In one embodiment, the immunogenic agent includes a glycoprotein, and the RNA effector molecules are directed against target genes involved in glycosylation (e.g., fucosylation) and/or proteolytic processing of glycoproteins by the host cell.

[0361] In another embodiment, the immunogenic agent is a multi-subunit recombinant protein and the RNA effector molecules are directed against target genes involved in the folding and/or secretion of the protein by the host cell. In another embodiment, the RNA effector molecules are directed against target genes involved in post-translation modification of the immunogenic protein in the cells, such as methionine oxidation, glycosylation, disulfide bond formation, pyroglutamation and/or protein deamidation.

[0362] In some embodiments, kits provided herein allow for the selection or optimization of at least one factor for enhancing production of the immunogenic agent. For example, the kits can allow for the selection of an RNA effector molecule from among a series of candidate RNA effector molecules, or for the selection of a concentration or concentration range from a wider range of concentrations of a given RNA effector molecule. In some embodiments, the kits allow for selection of one or more RNA effector molecules from a series of candidate RNA effector molecules directed against a common target gene. In further embodiments, the kits allow for selection of one or more RNA effector molecules from a series of candidate RNA effector molecules directed against two or more functionally related target genes or two or more target genes of a common host cell pathway.

[0363] In some embodiments, kits provided herein allow for the selection or optimization of a combination of two or more factors in the production of an immunogenic agent. For example, the kits can allow for the selection of a suitable RNA effector molecule from among a series of candidate RNA effector molecules as well as a concentration of the RNA effector molecule. In further embodiments, kits provided herein allow for the selection of a first RNA effector molecule from a first series of candidate RNA effector molecules and a second RNA effector molecule from a second series of candidate RNA effector molecules. In some embodiments, the first and/or second series of candidate RNA effector molecules are directed against a common target gene. In further embodiments, the first and/or second series of RNA effector molecules are directed against two or more functionally related target genes or two or more target genes of a common host cell pathway.

[0364] In another embodiment, a kit for enhancing production of an immunogenic agent in a cell, comprising at least a first RNA effector molecule, a portion of which is complementary to at least a first target gene of a latent or endogenous virus; a second RNA effector molecule, a portion of which is complementary to at least a secon target gene of the cellular immune response; and, optionally, a third RNA effector molecule, a portion of which is complementary to at least a third target gene of a cellular process. For example, the first target gene is an ERV env gene, the second target gene is a IFNAR1 or CDKN2A gene, and the third target gene is a PTEN, BAK1, FN1, or LDHA gene. The kit can further comprise at least additional RNA effector molecule that targets a cellular process including, but not limited to, carbon metabolism and transport, apoptosis, RNAi uptake and/or efficiency, reactive oxygen species production, cell cycle control, protein folding, pyroglutamation protein modification, deamidase, glycosylation, disulfide bond formation, protein secretion, gene amplification, viral replication, viral infection, viral particle release, control of cellular pH, and protein production.

[0365] In yet another aspect, the invention provides a method for inhibiting the expression of a target gene in a cell. The method includes administering a composition featured in the invention to the cell such that expression of the target gene is decreased, such as for an extended duration, e.g., at least two, three, four days or more. The RNA effector molecules useful for the methods and compositions featured in the invention specifically target RNAs (primary or processed) of the target gene. Compositions and methods for inhibiting the expression of these target genes using RNA effector molecules can be prepared and performed as described herein.

[0366] The invention encompasses vaccine formulations comprising the immunogenic agent and a suitable excipient. The terms “vaccine,” is well-understood. For example, the terms vaccine, vaccination or immunization can be understood to be a process or composition that increases a subject's immune reaction to an immunogen (e.g., by providing an active immune response), and therefore its ability to resist, overcome and/or recover from infection (i.e., a protective immune response).

[0367] The immunogenic agent used in the vaccine formulation can be a virus selected from naturally occurring mutants or variants, mutagenized viruses or genetically engineered viruses. Attenuated strains of segmented RNA viruses can also be generated via reassortment techniques, or by using a combination of the reverse genetics approach and reassortment techniques. Naturally occurring variants include viruses isolated from nature as well as spontaneous occurring variants generated during virus propagation, having, for example, an impaired ability to antagonize the cellular IFN response. The attenuated virus can itself be used as the active ingredient in the vaccine formulation. For example, the virus can include attenuated influenza viruses, cold-adapted influenza viruses, temperature-sensitive influenza viruses, reassortant influenza viruses, high yield donor influenza viruses, wild-type influenza viruses isolated from throat swabs of infected mammals, and viruses that have been passaged in embryonated chicken eggs or cell culture adapted strains of influenza viruses

[0368] Virus or viral-based immunogenic agents of the embodiments of the invention can be any type of animal virus, such as those of arenaviridae, orthomyxoviridae, paramyxoviridae, filoviridae, rabdoviridae, birnaviridae, reoviridae, picornaviridae, coronaviridae, flaviviridae, togaviridae, adenoviridae, herpesviridae, papovaviridae, parvoviridae, circoviridae, poxyiridae, and retroviridae. Particular viruses include poliovirus, hepatitis A virus (HAV), tick-borne encephalitis virus (TBEV), yellow fever virus, rubella virus, hepatitis C virus (HCV), hepatitis B virus (HBV), variola virus, mumps virus, measles virus, rubella virus, respiratory syncytial virus, vesicular stomatits virus (VSV), rabies virus, ebola virus, influenza virus, lassa virus, junin virus, reovirus, adenovirus type 1 to type 47, herpes simplex viruses (HSV 1, HSV 2), cytomegalo virus (CMV), varicella zoster vim (VZV), Epstein-Barr virus (EBV), human immunodeficiency virus (HIV), West Nile virus, rotavirus, or vaccinia virus.

[0369] Additionally, immunogenic agents of the embodiments of the present invention can be an antigenic composition or vaccine against the obligate intracellular parasite, Chlamydiae. For example, the chlamydiae can be Chlamydiae trachomatis, C. trachomatis, C. suis, C. pneumoniae, C. pecorum, C. psittaci, C. abortus, C. felis, or C. caviae. C. pneumoniae is a major cause of pneumonia in humans. C. trachomatis causes sexually transmitted diseases and eye infections in humans, is responsible for nearly 2.3 million cases of infection in the U.S. population, and includes the biovars trachoma (serovars A, B, Ba or C), urethritis (serovars D-K), and lymphogranuloma venereum (LGV, serovars L1, 2 and 3). See, e.g., Ryan & Ray, SHERRIS MED. MICRO. 463-70 (4th ed., McGraw Hill, 2004). Modified live C. psittaci vaccine of chicken embryo origin and inactivated chlamydial vaccines have been used. See, e.g., U.S. Pat. No. 4,271,146. Recombinant chlamydial antigens, such as chlamydial protease-like activity factor (CPAF) protein, have been described also. See, e.g., U.S. Patent Pubs. No. 2009/0098165, No. 2009/0155350; EP 0293079.

[0370] Additionally, the embodiments of the present invention provide are also applicable to production of an immunogenic bacterial agent in a eukaryotic cell. These include Shigella flexneri, Listeria monocytogenes, Rickettsiae tsutsugamushi, Rickettsiae rickettsiae, Mycobacterium leprae, Mycobacterium tuberculosis, Legionella pneumophila, Chlamydia ssp. Additionally, the embodiments of the present invention provide are also applicable to production of an immunogenic protozoal agent in a eukaryotic cell. These include Plasmodium falciparum, Trpanosoma cruzi, and Leishmania donovani.

[0371] Alternatively, the attenuated virus, bacteria, or protozoa can be used as the vector or “backbone” of recombinantly produced vaccines. To this end, recombinant techniques such as reverse genetics (or, for segmented viruses, combinations of the reverse genetics and reassortment techniques) can be used to engineer mutations or introduce foreign antigens into the attenuated virus used in the vaccine formulation. In this way, vaccines can be designed for immunization against strain variants, or in the alternative, against completely different infectious agents or disease antigens.

[0372] Any practical heterologous gene sequence can be constructed into the immunogenic agents (e.g., viruses, bacteria, or protozoa) of the invention for use in vaccines. Epitopes that induce a protective immune response to any of a variety of pathogens, or antigens that bind neutralizing antibodies can be expressed by or as part of the viruses. For example, heterologous gene sequences that can be constructed into the viruses of the invention for use in vaccines include but are not limited to epitopes of human immunodeficiency virus (HIV) such as gp120; hepatitis B virus surface antigen (HBsAg); the glycoproteins of herpes virus (e.g., gD, gE, gH, gL); VP1 of poliovirus; antigenic determinants of non-viral pathogens such as bacteria and parasites, to name but a few. In another embodiment, all or portions of immunoglobulin genes can be expressed. For example, variable regions of anti-idiotypic immunoglobulins that mimic such epitopes can be constructed into the viruses of the invention. In yet another embodiment, tumor associated antigens can be expressed.

[0373] Either a live recombinant vaccine or an inactivated recombinant vaccine can be formulated. A live vaccine may be preferred because multiplication in the host leads to a prolonged stimulus of similar kind and magnitude to that occurring in natural infections, and therefore, confers substantial, long-lasting immunity. Production of such live recombinant vaccine formulations can be accomplished using conventional methods involving propagation of the microbe or recombant vector in cell culture followed by purification.

[0374] Regarding influenza, these vaccine formulations can include genetically engineered negative strand RNA viruses that have mutations in the NS1 or analogous gene including but not limited to the truncated NS1 influenza mutants described in the working examples. They can also be formulated using natural variants, such as the A/turkey/Ore/71 natural variant of influenza A, or B/201, and B/AWBY-234, which are natural variants of influenza B. When formulated as a live virus vaccine, a range of about 10⁴ pfu to about 5×10⁶ pfu per dose can be used.

[0375] Vaccine formulations comprising the immunogenic agents of the invention and a pharmaceutically acceptable carrier are also provided, which can be formulated for administration in a pharmaceutical carrier in accordance with known techniques. See, e.g., Remington, SCIENCE & PRACTICE OF PHARMACY (latest edition); U.S. Patent Pub. No. 2009/0098165.

[0376] Many methods can be used to introduce the vaccine formulations described herein, these include but are not limited to intranasal, intratracheal, oral, intradermal, intramuscular, intraperitoneal, intravenous, and subcutaneous routes. It may be preferable to introduce the virus vaccine formulation via the natural route of infection of the pathogen for which the vaccine is designed, or via the natural route of infection of the parental attenuated virus. Where a live influenza virus vaccine preparation is used, it may be preferable to introduce the formulation via the natural route of infection for influenza virus. The ability of influenza virus to induce a vigorous secretory and cellular immune response can be used advantageously. For example, infection of the respiratory tract by influenza viruses may induce a strong secretory immune response, for example in the urogenital system, with concomitant protection against a particular disease causing agent.

[0377] A vaccine of the present invention could be administered once, or twice or three times with an interval of 2 to 6 months between doses. Alternatively, a vaccine of the present invention, comprising could be administered as often as needed to an animal or a human being.

[0378] As used herein the term “comprising” or “comprises” is used in reference to compositions, methods, and respective component(s) thereof, that are essential to the invention, yet open to the inclusion of unspecified elements, whether essential or not.

[0379] As used herein the term “consisting essentially of” refers to those elements required for a given embodiment. The term permits the presence of elements that do not materially affect the basic and novel or functional characteristic(s) of that embodiment of the invention.

[0380] The term “consisting of” refers to compositions, methods, and respective components thereof as described herein, which are exclusive of any element not recited in that description of the embodiment.

[0381] The present invention may be as defined in any one of the following numbered paragraphs.

[0382] Paragraph 1. A method of isolating a cell that is substantially devoid of a target virus, comprising: a. contacting a population of cells a portion of which comprises the target virus with an RNA effector molecule that inhibits the growth or replication of the target virus; b.

[0383] detecting the presence of the target virus in each cell; and, c. isolating at least one cell that is substantially devoid of the target virus.

[0384] Paragraph 2. The method of paragraph 1, further comprising repeating steps a-c.

[0385] Paragraph 3. The method of any of paragraphs 1-2, further comprising detecting the presence or absence of target viral nucleic acid or protein.

[0386] Paragraph 4. The method of any of paragraphs 1-3, wherein the isolated cell is free of the target virus.

[0387] Paragraph 5. The method of any of paragraphs 1-4, wherein steps a-c are repeated when target viral nucleic acid or protein is detected.

[0388] Paragraph 6. The method any paragraphs 1-5, wherein the target viral nucleic acid is detected by a method selected from the group consisting of: polymerase chain reaction (PCR), reverse transcription polymerase chain reaction (RT-PCR), rapid amplification of cDNA ends (RACE), dot blot hybridization, Northern hybridization, and Southern hybridization.

[0389] Paragraph 7. The method any of paragraphs 1-5, wherein the target viral protein is detected by a method selected from the group consisting of: radioimmunoassay, competitive-binding assay, ELISA, Western blot, FACS, immunohistochemistry, immunoprecipitation, proteomics, mass spectrometry, electrophoresis, and immunofluoresence.

[0390] Paragraph 8. The method of any of paragraphs 1-7, wherein the presence of the target virus of step b) is immunologically detected.

[0391] Paragraph 9. The method of paragraph 8, wherein the presence of the target virus is detected using an antibody against a capsid protein (Cap).

[0392] Paragraph 10. The method of any of paragraphs 1-9, wherein the cell further comprises a second virus.

[0393] Paragraph 11. The method of any of paragraphs 1-10, further comprising detecting the presence of the second virus.

[0394] Paragraph 12. The method of any of paragraphs 1-11, wherein the presence of the second virus is detected by detection of viral nucleic acid or viral protein of the second virus.

[0395] Paragraph 13. The method of paragraph 12, wherein the viral nucleic acid is detected by a method selected from the group consisting of: polymerase chain reaction (PCR), reverse transcription polymerase chain reaction (RT-PCR), rapid amplification of cDNA ends (RACE), dot blot hybridization, Northern hybridization, and Southern hybridization.

[0396] Paragraph 14. The method of paragraph 12, wherein the viral protein is detected by a method selected from the group consisting of: radioimmunoassay, competitive-binding assay, ELISA, Western blot, FACS, immunohistochemistry, immunoprecipitation, proteomics, mass spectrometry, electrophoresis, and immunofluoresence.

[0397] Paragraph 15. The method of paragraph 10, wherein the second virus is rotavirus.

[0398] Paragraph 16. The method of any of paragraphs 1-15, wherein the target virus is a non-integrating virus.

[0399] Paragraph 17. The method of paragraph 16, wherein the target virus is porcine circovirus.

[0400] Paragraph 18. The method of any of paragraphs 1-17, wherein the RNA effector molecule is detectably labeled.

[0401] Paragraph 19. The method of any of paragraphs 1-18, further comprising detecting the presence of the RNA effector molecule in the cell.

[0402] Paragraph 20. A cell that is substantially devoid of a target virus, obtained by the process of any of paragraphs 1-19.

[0403] Paragraph 21. A method of producing an immunogenic agent, comprising: a.

[0404] culturing the cell of paragraph 15 under conditions that allow expression of the immunogenic agent; and, b. isolating the immunogenic agent.

[0405] Paragraph 22. A method of preparing a virus stock that is substantially devoid of an unwanted target virus, comprising: (a) contacting a virus stock that contains unwanted target virus with an agent that binds specifically with the unwanted target virus; and (b) collecting the unbound virus stock.

[0406] Paragraph 23. The method of paragraph 22, further comprising repeating steps (a) and (b).

[0407] Paragraph 24. The method of any of paragraphs 22-23, further comprising detecting the presence or absence of target viral nucleic acid or protein from the virus stock.

[0408] Paragraph 25. The method of any of paragraphs 22-24, wherein the agent is immobilized.

[0409] Paragraph 26. The method of any of paragraphs 22-25, wherein the agent is a receptor, an antibody, or an antigen binding fragment thereof.

[0410] Paragraph 27. The method of any of paragraphs 22-26, wherein the agent is an antibody that binds to the porcine circovirus-1 (PCV-1)

[0411] Paragraph 28. The method of paragraph 27, wherein the antibody binds to the porcine circovirus-1 (PCV-1) capsid (Cap) protein.

[0412] Paragraph 29. The method of paragraph 26, wherein the receptor is heparin.

[0413] Paragraph 30. The method of any of paragraphs 22-29, wherein the agent is a receptor on a cell surface.

[0414] Paragraph 31. The method of paragraph 30, wherein the receptor on a cell surface is heparin.

[0415] Paragraph 32. The method of any of paragraphs 22-31, further comprising contacting the cell with a RNA effector molecule that increases the presence of the receptor on the cell surface.

[0416] Paragraph 33. The method of paragraph 32, wherein the RNA effector molecule targets the heparanase gene.

[0417] Paragraph 34. The method of paragraph 30, wherein the cell does not have a receptor that binds the desired virus of the virus stock.

[0418] Paragraph 35. The method of paragraph 34, wherein the receptor is sialic acid.

[0419] Paragraph 36. The method of paragraph 30, wherein the cell is treated to have decreased level of cell receptor to the desired virus stock.

[0420] Paragraph 37. The method of paragraph 36, wherein the cell is treated by physical, chemical, or enzymatic means.

[0421] Paragraph 38. The method of paragraph 34 or paragraph 36, wherein the presence of a cell receptor to the desired viral stock has been decreased by contacting the cell with a RNA effector molecule that inhibits expression of the cell receptor.

[0422] Paragraph 39. The method of any one of paragraphs 30 to 38, further comprising (a) contacting the unbound virus stock with a host cell; (b) contacting the cell with an RNA effector molecule that inhibits growth or replication of the unwanted target virus; and (c) isolating the virus stock from the medium.

[0423] Paragraph 40. The method of paragraph 39, wherein the host cell does not have a receptor for the unwanted target virus.

[0424] Paragraph 41. A virus stock that is substantially devoid of unwanted target virus prepared by the methods of any one of paragraphs 22 to 40.

[0425] Paragraph 42. The virus stock of paragraph 41, wherein the virus stock is rotavirus.

[0426] Paragraph 43. The virus stock of paragraph 41 or paragraph 42, wherein the unwanted target virus is PCV1.

[0427] Paragraph 44. A biological product made using the virus stock of paragraph 41.

[0428] Paragraph 45. The biological product of paragraph 44, wherein the product is rotavirus vaccine.

[0429] Paragraph 46. A method of preparing a virus stock that is substantially devoid of an unwanted target virus, comprising: (a) propagating a virus stock in a host cell in which expression of a receptor for a suspected viral contaminant has been inhibited; and (b) collecting the virus stock.

[0430] Paragraph 47. The method of paragraph 46, wherein the receptor is heparin.

[0431] Paragraph 48. The method of paragraph 47, wherein the heparin is inhibited by contacting the host cell with a RNA effector molecule that targets an epimerase, a xylosyltransferase, a galactosyltransferase, a N-acetylglucosaminyl transferase, a glucuronosyl transferase, or a 2 O sulfotransferase gene.

[0432] Paragraph 49. The method of any one of paragraphs 46 to 48, further comprising contacting the host cell with a RNA effector molecule that inhibits the growth or replication of the unwanted target virus.

[0433] Paragraph 50. The method of any of paragraphs 46 to 49, wherein the unwanted target virus is PCV1.

[0434] Paragraph 51. A virus stock that is substantially devoid of an unwanted target virus, prepared by any of the paragraphs of paragraphs 46 to 50.

[0435] Paragraph 52. The virus stock of paragraph 51, wherein the virus stock is rotavirus.

[0436] Paragraph 53. A biological product made using the virus stock of paragraph 51.

[0437] Paragraph 54. The biological product of paragraph 53, wherein the product is rotavirus vaccine.

[0438] Paragraph 55. A virus stock that is substantially devoid of an unwanted target virus, prepared by the process comprising: (a) contacting a virus stock that contains unwanted target virus with an agent that binds specifically with the unwanted target virus; and (b) collecting the unbound virus stock.

[0439] Paragraph 56. A virus stock that is substantially devoid of an unwanted target virus, prepared by the process comprising: (a) propagating a virus stock in a host cell in which expression of a receptor for a suspected viral contaminant has been inhibited; and (b) collecting the stock virus.

### EXAMPLES

### Example 1

### dsRNAs for Target Gene PCV1 Rep Coding Sequence

[0440] Where the source of a reagent is not specifically given herein, such reagent can be obtained from any supplier of reagents for molecular biology at a quality/purity standard for application in molecular biology. Oligonucleotides are synthesized as described elsewhere, see, e.g., U.S. Application Ser. No. 61/223,370.

[0441] Duplexes against the Rep/Rep′ coding sequence portion of the porcine circovirus genome (reference strain, genbank accession AY193712.1, subsequence from position 47 to 985) were designed as shown in Table 2. Duplexes designed against Porcine Circovirus 1 (PCV1) Cap gene are shown in Table 21. In one embodiment, the dsRNA for targeting PCV1 rep is a duplex designed from start position 38, 39, 41, 61, 90, 121, 126, 133, 136, 163, 169, 184, 185, 204, 233, 253, 254, 258, 346, 353, 378, 409, 412, 438, 489, 534, 560, 573, 594, 600, 613, 614, 622, 648, 651, 676, 684, 691, 733, 740, 769, 797, 808, 819, 822, 827, 843, or 908 as shown in Table 2 (wherein # indicates start position):

TABLE 2
Target gene: PCV1 rep

| SEQ ID NO: | # | Sense (5′ to 3′) | Antisense (5′ to 3′) | SEQ ID NO: |
|---|---|---|---|---|
| 16 | 1 | AUGCCAAGCAAGAAAAGCG | CGCUUUUCUUGCUUGGCAU | 678 |
| 17 | 2 | UGCCAAGCAAGAAAAGCGG | CCGCUUUUCUUGCUUGGCA | 679 |
| 18 | 3 | GCCAAGCAAGAAAAGCGGC | GCCGCUUUUCUUGCUUGGC | 680 |
| 19 | 4 | CCAAGCAAGAAAAGCGGCC | GGCCGCUUUUCUUGCUUGG | 681 |
| 20 | 5 | CAAGCAAGAAAAGCGGCCC | GGGCCGCUUUUCUUGCUUG | 682 |
| 21 | 6 | AAGCAAGAAAAGCGGCCCG | CGGGCCGCUUUUCUUGCUU | 683 |
| 22 | 9 | CAAGAAAAGCGGCCCGCAA | UUGCGGGCCGCUUUUCUUG | 684 |
| 23 | 10 | AAGAAAAGCGGCCCGCAAC | GUUGCGGGCCGCUUUUCUU | 685 |
| 24 | 22 | CCGCAACCCCAUAAGAGGU | ACCUCUUAUGGGGUUGCGG | 686 |
| 25 | 23 | CGCAACCCCAUAAGAGGUG | CACCUCUUAUGGGGUUGCG | 687 |
| 26 | 24 | GCAACCCCAUAAGAGGUGG | CCACCUCUUAUGGGGUUGC | 688 |
| 27 | 25 | CAACCCCAUAAGAGGUGGG | CCCACCUCUUAUGGGGUUG | 689 |
| 28 | 26 | AACCCCAUAAGAGGUGGGU | ACCCACCUCUUAUGGGGUU | 690 |
| 29 | 27 | ACCCCAUAAGAGGUGGGUG | CACCCACCUCUUAUGGGGU | 691 |
| 30 | 28 | CCCCAUAAGAGGUGGGUGU | ACACCCACCUCUUAUGGGG | 692 |
| 31 | 29 | CCCAUAAGAGGUGGGUGUU | AACACCCACCUCUUAUGGG | 693 |
| 32 | 30 | CCAUAAGAGGUGGGUGUUC | GAACACCCACCUCUUAUGG | 694 |
| 33 | 31 | CAUAAGAGGUGGGUGUUCA | UGAACACCCACCUCUUAUG | 695 |
| 34 | 32 | AUAAGAGGUGGGUGUUCAC | GUGAACACCCACCUCUUAU | 696 |
| 35 | 33 | UAAGAGGUGGGUGUUCACC | GGUGAACACCCACCUCUUA | 697 |
| 36 | 34 | AAGAGGUGGGUGUUCACCC | GGGUGAACACCCACCUCUU | 698 |
| 37 | 35 | AGAGGUGGGUGUUCACCCU | AGGGUGAACACCCACCUCU | 699 |
| 38 | 36 | GAGGUGGGUGUUCACCCUU | AAGGGUGAACACCCACCUC | 700 |
| 39 | 37 | AGGUGGGUGUUCACCCUUA | UAAGGGUGAACACCCACCU | 701 |
| 40 | 38 | GGUGGGUGUUCACCCUUAA | UUAAGGGUGAACACCCACC | 702 |
| 41 | 39 | GUGGGUGUUCACCCUUAAU | AUUAAGGGUGAACACCCAC | 703 |
| 42 | 40 | UGGGUGUUCACCCUUAAUA | UAUUAAGGGUGAACACCCA | 704 |
| 43 | 41 | GGGUGUUCACCCUUAAUAA | UUAUUAAGGGUGAACACCC | 705 |
| 44 | 42 | GGUGUUCACCCUUAAUAAU | AUUAUUAAGGGUGAACACC | 706 |
| 45 | 43 | GUGUUCACCCUUAAUAAUC | GAUUAUUAAGGGUGAACAC | 707 |
| 46 | 44 | UGUUCACCCUUAAUAAUCC | GGAUUAUUAAGGGUGAACA | 708 |
| 47 | 45 | GUUCACCCUUAAUAAUCCU | AGGAUUAUUAAGGGUGAAC | 709 |
| 48 | 46 | UUCACCCUUAAUAAUCCUU | AAGGAUUAUUAAGGGUGAA | 710 |
| 49 | 47 | UCACCCUUAAUAAUCCUUC | GAAGGAUUAUUAAGGGUGA | 711 |
| 50 | 48 | CACCCUUAAUAAUCCUUCC | GGAAGGAUUAUUAAGGGUG | 712 |
| 51 | 49 | ACCCUUAAUAAUCCUUCCG | CGGAAGGAUUAUUAAGGGU | 713 |
| 52 | 50 | CCCUUAAUAAUCCUUCCGA | UCGGAAGGAUUAUUAAGGG | 714 |
| 53 | 51 | CCUUAAUAAUCCUUCCGAG | CUCGGAAGGAUUAUUAAGG | 715 |
| 54 | 52 | CUUAAUAAUCCUUCCGAGG | CCUCGGAAGGAUUAUUAAG | 716 |
| 55 | 53 | UUAAUAAUCCUUCCGAGGA | UCCUCGGAAGGAUUAUUAA | 717 |
| 56 | 54 | UAAUAAUCCUUCCGAGGAG | CUCCUCGGAAGGAUUAUUA | 718 |
| 57 | 55 | AAUAAUCCUUCCGAGGAGG | CCUCCUCGGAAGGAUUAUU | 719 |
| 58 | 56 | AUAAUCCUUCCGAGGAGGA | UCCUCCUCGGAAGGAUUAU | 720 |
| 59 | 57 | UAAUCCUUCCGAGGAGGAG | CUCCUCCUCGGAAGGAUUA | 721 |
| 60 | 58 | AAUCCUUCCGAGGAGGAGA | UCUCCUCCUCGGAAGGAUU | 722 |
| 61 | 59 | AUCCUUCCGAGGAGGAGAA | UUCUCCUCCUCGGAAGGAU | 723 |
| 62 | 60 | UCCUUCCGAGGAGGAGAAA | UUUCUCCUCCUCGGAAGGA | 724 |
| 63 | 61 | CCUUCCGAGGAGGAGAAAA | UUUUCUCCUCCUCGGAAGG | 725 |
| 64 | 78 | AAACAAAAUACGGGAGCUU | AAGCUCCCGUAUUUUGUUU | 726 |
| 65 | 79 | AACAAAAUACGGGAGCUUC | GAAGCUCCCGUAUUUUGUU | 727 |
| 66 | 80 | ACAAAAUACGGGAGCUUCC | GGAAGCUCCCGUAUUUUGU | 728 |
| 67 | 81 | CAAAAUACGGGAGCUUCCA | UGGAAGCUCCCGUAUUUUG | 729 |
| 68 | 82 | AAAAUACGGGAGCUUCCAA | UUGGAAGCUCCCGUAUUUU | 730 |
| 69 | 83 | AAAUACGGGAGCUUCCAAU | AUUGGAAGCUCCCGUAUUU | 731 |
| 70 | 84 | AAUACGGGAGCUUCCAAUC | GAUUGGAAGCUCCCGUAUU | 732 |
| 71 | 85 | AUACGGGAGCUUCCAAUCU | AGAUUGGAAGCUCCCGUAU | 733 |
| 72 | 86 | UACGGGAGCUUCCAAUCUC | GAGAUUGGAAGCUCCCGUA | 734 |
| 73 | 87 | ACGGGAGCUUCCAAUCUCC | GGAGAUUGGAAGCUCCCGU | 735 |
| 74 | 89 | GGGAGCUUCCAAUCUCCCU | AGGGAGAUUGGAAGCUCCC | 736 |
| 75 | 90 | GGAGCUUCCAAUCUCCCUU | AAGGGAGAUUGGAAGCUCC | 737 |
| 76 | 91 | GAGCUUCCAAUCUCCCUUU | AAAGGGAGAUUGGAAGCUC | 738 |
| 77 | 92 | AGCUUCCAAUCUCCCUUUU | AAAAGGGAGAUUGGAAGCU | 739 |
| 78 | 109 | UUUGAUUAUUUUGUUUGCG | CGCAAACAAAAUAAUCAAA | 740 |
| 79 | 110 | UUGAUUAUUUUGUUUGCGG | CCGCAAACAAAAUAAUCAA | 741 |
| 80 | 111 | UGAUUAUUUUGUUUGCGGA | UCCGCAAACAAAAUAAUCA | 742 |
| 81 | 112 | GAUUAUUUUGUUUGCGGAG | CUCCGCAAACAAAAUAAUC | 743 |
| 82 | 113 | AUUAUUUUGUUUGCGGAGA | UCUCCGCAAACAAAAUAAU | 744 |
| 83 | 114 | UUAUUUUGUUUGCGGAGAG | CUCUCCGCAAACAAAAUAA | 745 |
| 84 | 115 | UAUUUUGUUUGCGGAGAGG | CCUCUCCGCAAACAAAAUA | 746 |
| 85 | 116 | AUUUUGUUUGCGGAGAGGA | UCCUCUCCGCAAACAAAAU | 747 |
| 86 | 117 | UUUUGUUUGCGGAGAGGAA | UUCCUCUCCGCAAACAAAA | 748 |
| 87 | 118 | UUUGUUUGCGGAGAGGAAG | CUUCCUCUCCGCAAACAAA | 749 |
| 88 | 119 | UUGUUUGCGGAGAGGAAGG | CCUUCCUCUCCGCAAACAA | 750 |
| 89 | 120 | UGUUUGCGGAGAGGAAGGU | ACCUUCCUCUCCGCAAACA | 751 |
| 90 | 121 | GUUUGCGGAGAGGAAGGUU | AACCUUCCUCUCCGCAAAC | 752 |
| 91 | 122 | UUUGCGGAGAGGAAGGUUU | AAACCUUCCUCUCCGCAAA | 753 |
| 92 | 123 | UUGCGGAGAGGAAGGUUUG | CAAACCUUCCUCUCCGCAA | 754 |
| 93 | 124 | UGCGGAGAGGAAGGUUUGG | CCAAACCUUCCUCUCCGCA | 755 |
| 94 | 125 | GCGGAGAGGAAGGUUUGGA | UCCAAACCUUCCUCUCCGC | 756 |
| 95 | 126 | CGGAGAGGAAGGUUUGGAA | UUCCAAACCUUCCUCUCCG | 757 |
| 96 | 127 | GGAGAGGAAGGUUUGGAAG | CUUCCAAACCUUCCUCUCC | 758 |
| 97 | 128 | GAGAGGAAGGUUUGGAAGA | UCUUCCAAACCUUCCUCUC | 759 |
| 98 | 129 | AGAGGAAGGUUUGGAAGAG | CUCUUCCAAACCUUCCUCU | 760 |
| 99 | 130 | GAGGAAGGUUUGGAAGAGG | CCUCUUCCAAACCUUCCUC | 761 |
| 100 | 131 | AGGAAGGUUUGGAAGAGGG | CCCUCUUCCAAACCUUCCU | 762 |
| 101 | 132 | GGAAGGUUUGGAAGAGGGU | ACCCUCUUCCAAACCUUCC | 763 |
| 102 | 133 | GAAGGUUUGGAAGAGGGUA | UACCCUCUUCCAAACCUUC | 764 |
| 103 | 134 | AAGGUUUGGAAGAGGGUAG | CUACCCUCUUCCAAACCUU | 765 |
| 104 | 135 | AGGUUUGGAAGAGGGUAGA | UCUACCCUCUUCCAAACCU | 766 |
| 105 | 136 | GGUUUGGAAGAGGGUAGAA | UUCUACCCUCUUCCAAACC | 767 |
| 106 | 137 | GUUUGGAAGAGGGUAGAAC | GUUCUACCCUCUUCCAAAC | 768 |
| 107 | 138 | UUUGGAAGAGGGUAGAACU | AGUUCUACCCUCUUCCAAA | 769 |
| 108 | 139 | UUGGAAGAGGGUAGAACUC | GAGUUCUACCCUCUUCCAA | 770 |
| 109 | 141 | GGAAGAGGGUAGAACUCCU + C57 | GGAGUUCUACCCUCUUCCA | 771 |
| 110 | 142 | GAAGAGGGUAGAACUCCUC | AGGAGUUCUACCCUCUUCC | 772 |
| 111 | 143 | AAGAGGGUAGAACUCCUCA | GAGGAGUUCUACCCUCUUC | 773 |
| 112 | 144 | AGAGGGUAGAACUCCUCAC | UGAGGAGUUCUACCCUCUU | 774 |
| 113 | 145 | GAGGGUAGAACUCCUCACC | GUGAGGAGUUCUACCCUCU | 775 |
| 114 | 146 | AGGGUAGAACUCCUCACCU | GGUGAGGAGUUCUACCCUC | 776 |
| 115 | 147 | GGGUAGAACUCCUCACCUC | AGGUGAGGAGUUCUACCCU | 777 |
| 116 | 148 | GGUAGAACUCCUCACCUCC | GAGGUGAGGAGUUCUACCC | 778 |
| 117 | 149 | GUAGAACUCCUCACCUCCA | GGAGGUGAGGAGUUCUACC | 779 |
| 118 | 150 | UAGAACUCCUCACCUCCAG | UGGAGGUGAGGAGUUCUAC | 780 |
| 119 | 151 | AGAACUCCUCACCUCCAGG | CUGGAGGUGAGGAGUUCUA | 781 |
| 120 | 156 | UCCUCACCUCCAGGGGUUU | CCUGGAGGUGAGGAGUUCU | 782 |
| 121 | 161 | ACCUCCAGGGGUUUGCGAA | AAACCCCUGGAGGUGAGGA | 783 |
| 122 | 162 | CCUCCAGGGGUUUGCGAAU | UUCGCAAACCCCUGGAGGU | 784 |
| 123 | 163 | CUCCAGGGGUUUGCGAAUU | AUUCGCAAACCCCUGGAGG | 785 |
| 124 | 164 | UCCAGGGGUUUGCGAAUUU | AAUUCGCAAACCCCUGGAG | 786 |
| 125 | 169 | GGGUUUGCGAAUUUUGCUA | AAAUUCGCAAACCCCUGGA | 787 |
| 126 | 170 | GGUUUGCGAAUUUUGCUAA | UAGCAAAAUUCGCAAACCC | 788 |
| 127 | 171 | GUUUGCGAAUUUUGCUAAG | UUAGCAAAAUUCGCAAACC | 789 |
| 128 | 172 | UUUGCGAAUUUUGCUAAGA | CUUAGCAAAAUUCGCAAAC | 790 |
| 129 | 173 | UUGCGAAUUUUGCUAAGAA | UCUUAGCAAAAUUCGCAAA | 791 |
| 130 | 174 | UGCGAAUUUUGCUAAGAAG | UUCUUAGCAAAAUUCGCAA | 792 |
| 131 | 175 | GCGAAUUUUGCUAAGAAGC | CUUCUUAGCAAAAUUCGCA | 793 |
| 132 | 176 | CGAAUUUUGCUAAGAAGCA | GCUUCUUAGCAAAAUUCGC | 794 |
| 133 | 177 | GAAUUUUGCUAAGAAGCAG | UGCUUCUUAGCAAAAUUCG | 795 |
| 134 | 178 | AAUUUUGCUAAGAAGCAGA | CUGCUUCUUAGCAAAAUUC | 796 |
| 135 | 179 | AUUUUGCUAAGAAGCAGAC | UCUGCUUCUUAGCAAAAUU | 797 |
| 136 | 180 | UUUUGCUAAGAAGCAGACU | GUCUGCUUCUUAGCAAAAU | 798 |
| 137 | 181 | UUUGCUAAGAAGCAGACUU | AGUCUGCUUCUUAGCAAAA | 799 |
| 138 | 182 | UUGCUAAGAAGCAGACUUU | AAGUCUGCUUCUUAGCAAA | 800 |
| 139 | 183 | UGCUAAGAAGCAGACUUUU | AAAGUCUGCUUCUUAGCAA | 801 |
| 140 | 184 | GCUAAGAAGCAGACUUUUA | AAAAGUCUGCUUCUUAGCA | 802 |
| 141 | 185 | CUAAGAAGCAGACUUUUAA | UAAAAGUCUGCUUCUUAGC | 803 |
| 142 | 186 | UAAGAAGCAGACUUUUAAC | UUAAAAGUCUGCUUCUUAG | 804 |
| 143 | 187 | AAGAAGCAGACUUUUAACA | GUUAAAAGUCUGCUUCUUA | 805 |
| 144 | 188 | AGAAGCAGACUUUUAACAA | UGUUAAAAGUCUGCUUCUU | 806 |
| 145 | 189 | GAAGCAGACUUUUAACAAG | UUGUUAAAAGUCUGCUUCU | 807 |
| 146 | 190 | AAGCAGACUUUUAACAAGG | CUUGUUAAAAGUCUGCUUC | 808 |
| 147 | 191 | AGCAGACUUUUAACAAGGU | CCUUGUUAAAAGUCUGCUU | 809 |
| 148 | 192 | GCAGACUUUUAACAAGGUG | ACCUUGUUAAAAGUCUGCU | 810 |
| 149 | 193 | CAGACUUUUAACAAGGUGA | CACCUUGUUAAAAGUCUGC | 811 |
| 150 | 194 | AGACUUUUAACAAGGUGAA | UCACCUUGUUAAAAGUCUG | 812 |
| 151 | 195 | GACUUUUAACAAGGUGAAG | UUCACCUUGUUAAAAGUCU | 813 |
| 152 | 196 | ACUUUUAACAAGGUGAAGU | CUUCACCUUGUUAAAAGUC | 814 |
| 153 | 197 | CUUUUAACAAGGUGAAGUG | ACUUCACCUUGUUAAAAGU | 815 |
| 154 | 198 | UUUUAACAAGGUGAAGUGG | CACUUCACCUUGUUAAAAG | 816 |
| 155 | 199 | UUUAACAAGGUGAAGUGGU | CCACUUCACCUUGUUAAAA | 817 |
| 156 | 200 | UUAACAAGGUGAAGUGGUA | ACCACUUCACCUUGUUAAA | 818 |
| 157 | 201 | UAACAAGGUGAAGUGGUAU | UACCACUUCACCUUGUUAA | 819 |
| 158 | 202 | AACAAGGUGAAGUGGUAUU | AUACCACUUCACCUUGUUA | 820 |
| 159 | 203 | ACAAGGUGAAGUGGUAUUU | AAUACCACUUCACCUUGUU | 821 |
| 160 | 204 | CAAGGUGAAGUGGUAUUUU | AAAUACCACUUCACCUUGU | 822 |
| 161 | 205 | AAGGUGAAGUGGUAUUUUG | AAAAUACCACUUCACCUUG | 823 |
| 162 | 206 | AGGUGAAGUGGUAUUUUGG | CAAAAUACCACUUCACCUU | 824 |
| 163 | 207 | GGUGAAGUGGUAUUUUGGU | CCAAAAUACCACUUCACCU | 825 |
| 164 | 208 | GUGAAGUGGUAUUUUGGUG | ACCAAAAUACCACUUCACC | 826 |
| 165 | 209 | UGAAGUGGUAUUUUGGUGC | CACCAAAAUACCACUUCAC | 827 |
| 166 | 210 | GAAGUGGUAUUUUGGUGCC | GCACCAAAAUACCACUUCA | 828 |
| 167 | 211 | AAGUGGUAUUUUGGUGCCC | GGCACCAAAAUACCACUUC | 829 |
| 168 | 212 | AGUGGUAUUUUGGUGCCCG | GGGCACCAAAAUACCACUU | 830 |
| 169 | 213 | GUGGUAUUUUGGUGCCCGC | GCGGGCACCAAAAUACCAC | 831 |
| 170 | 214 | UGGUAUUUUGGUGCCCGCU | AGCGGGCACCAAAAUACCA | 832 |
| 171 | 215 | GGUAUUUUGGUGCCCGCUG | CAGCGGGCACCAAAAUACC | 833 |
| 172 | 216 | GUAUUUUGGUGCCCGCUGC | GCAGCGGGCACCAAAAUAC | 834 |
| 173 | 217 | UAUUUUGGUGCCCGCUGCC | GGCAGCGGGCACCAAAAUA | 835 |
| 174 | 218 | AUUUUGGUGCCCGCUGCCA | UGGCAGCGGGCACCAAAAU | 836 |
| 175 | 228 | CCGCUGCCACAUCGAGAAA | UUUCUCGAUGUGGCAGCGG | 837 |
| 176 | 229 | CGCUGCCACAUCGAGAAAG | CUUUCUCGAUGUGGCAGCG | 838 |
| 177 | 230 | GCUGCCACAUCGAGAAAGC | GCUUUCUCGAUGUGGCAGC | 839 |
| 178 | 231 | CUGCCACAUCGAGAAAGCG | CGCUUUCUCGAUGUGGCAG | 840 |
| 179 | 232 | UGCCACAUCGAGAAAGCGA | UCGCUUUCUCGAUGUGGCA | 841 |
| 180 | 233 | GCCACAUCGAGAAAGCGAA | UUCGCUUUCUCGAUGUGGC | 842 |
| 181 | 234 | CCACAUCGAGAAAGCGAAA | UUUCGCUUUCUCGAUGUGG | 843 |
| 182 | 235 | CACAUCGAGAAAGCGAAAG | CUUUCGCUUUCUCGAUGUG | 844 |
| 183 | 236 | ACAUCGAGAAAGCGAAAGG | CCUUUCGCUUUCUCGAUGU | 845 |
| 184 | 237 | CAUCGAGAAAGCGAAAGGA | UCCUUUCGCUUUCUCGAUG | 846 |
| 185 | 238 | AUCGAGAAAGCGAAAGGAA | UUCCUUUCGCUUUCUCGAU | 847 |
| 186 | 239 | UCGAGAAAGCGAAAGGAAC | GUUCCUUUCGCUUUCUCGA | 848 |
| 187 | 240 | CGAGAAAGCGAAAGGAACC | GGUUCCUUUCGCUUUCUCG | 849 |
| 188 | 241 | GAGAAAGCGAAAGGAACCG | CGGUUCCUUUCGCUUUCUC | 850 |
| 189 | 242 | AGAAAGCGAAAGGAACCGA | UCGGUUCCUUUCGCUUUCU | 851 |
| 190 | 243 | GAAAGCGAAAGGAACCGAC | GUCGGUUCCUUUCGCUUUC | 852 |
| 191 | 244 | AAAGCGAAAGGAACCGACC | GGUCGGUUCCUUUCGCUUU | 853 |
| 192 | 245 | AAGCGAAAGGAACCGACCA | UGGUCGGUUCCUUUCGCUU | 854 |
| 193 | 246 | AGCGAAAGGAACCGACCAG | CUGGUCGGUUCCUUUCGCU | 855 |
| 194 | 248 | CGAAAGGAACCGACCAGCA | UGCUGGUCGGUUCCUUUCG | 856 |
| 195 | 249 | GAAAGGAACCGACCAGCAG | CUGCUGGUCGGUUCCUUUC | 857 |
| 196 | 250 | AAAGGAACCGACCAGCAGA | UCUGCUGGUCGGUUCCUUU | 858 |
| 197 | 251 | AAGGAACCGACCAGCAGAA | UUCUGCUGGUCGGUUCCUU | 859 |
| 198 | 252 | AGGAACCGACCAGCAGAAU | AUUCUGCUGGUCGGUUCCU | 860 |
| 199 | 253 | GGAACCGACCAGCAGAAUA | UAUUCUGCUGGUCGGUUCC | 861 |
| 200 | 254 | GAACCGACCAGCAGAAUAA | UUAUUCUGCUGGUCGGUUC | 862 |
| 201 | 255 | AACCGACCAGCAGAAUAAA | UUUAUUCUGCUGGUCGGUU | 863 |
| 202 | 256 | ACCGACCAGCAGAAUAAAG | CUUUAUUCUGCUGGUCGGU | 864 |
| 203 | 257 | CCGACCAGCAGAAUAAAGA | UCUUUAUUCUGCUGGUCGG | 865 |
| 204 | 258 | CGACCAGCAGAAUAAAGAA | UUCUUUAUUCUGCUGGUCG | 866 |
| 205 | 259 | GACCAGCAGAAUAAAGAAU | AUUCUUUAUUCUGCUGGUC | 867 |
| 206 | 260 | ACCAGCAGAAUAAAGAAUA | UAUUCUUUAUUCUGCUGGU | 868 |
| 207 | 261 | CCAGCAGAAUAAAGAAUAC | GUAUUCUUUAUUCUGCUGG | 869 |
| 208 | 262 | CAGCAGAAUAAAGAAUACU | AGUAUUCUUUAUUCUGCUG | 870 |
| 209 | 263 | AGCAGAAUAAAGAAUACUG | CAGUAUUCUUUAUUCUGCU | 871 |
| 210 | 264 | GCAGAAUAAAGAAUACUGC | GCAGUAUUCUUUAUUCUGC | 872 |
| 211 | 265 | CAGAAUAAAGAAUACUGCA | UGCAGUAUUCUUUAUUCUG | 873 |
| 212 | 266 | AGAAUAAAGAAUACUGCAG | CUGCAGUAUUCUUUAUUCU | 874 |
| 213 | 267 | GAAUAAAGAAUACUGCAGU | ACUGCAGUAUUCUUUAUUC | 875 |
| 214 | 268 | AAUAAAGAAUACUGCAGUA | UACUGCAGUAUUCUUUAUU | 876 |
| 215 | 269 | AUAAAGAAUACUGCAGUAA | UUACUGCAGUAUUCUUUAU | 877 |
| 216 | 270 | UAAAGAAUACUGCAGUAAA | UUUACUGCAGUAUUCUUUA | 878 |
| 217 | 271 | AAAGAAUACUGCAGUAAAG | CUUUACUGCAGUAUUCUUU | 879 |
| 218 | 272 | AAGAAUACUGCAGUAAAGA | UCUUUACUGCAGUAUUCUU | 880 |
| 219 | 273 | AGAAUACUGCAGUAAAGAA | UUCUUUACUGCAGUAUUCU | 881 |
| 220 | 274 | GAAUACUGCAGUAAAGAAG | CUUCUUUACUGCAGUAUUC | 882 |
| 221 | 275 | AAUACUGCAGUAAAGAAGG | CCUUCUUUACUGCAGUAUU | 883 |
| 222 | 276 | AUACUGCAGUAAAGAAGGC | GCCUUCUUUACUGCAGUAU | 884 |
| 223 | 277 | UACUGCAGUAAAGAAGGCC | GGCCUUCUUUACUGCAGUA | 885 |
| 224 | 278 | ACUGCAGUAAAGAAGGCCA | UGGCCUUCUUUACUGCAGU | 886 |
| 225 | 279 | CUGCAGUAAAGAAGGCCAC | GUGGCCUUCUUUACUGCAG | 887 |
| 226 | 280 | UGCAGUAAAGAAGGCCACA | UGUGGCCUUCUUUACUGCA | 888 |
| 227 | 281 | GCAGUAAAGAAGGCCACAU | AUGUGGCCUUCUUUACUGC | 889 |
| 228 | 282 | CAGUAAAGAAGGCCACAUA | UAUGUGGCCUUCUUUACUG | 890 |
| 229 | 283 | AGUAAAGAAGGCCACAUAC | GUAUGUGGCCUUCUUUACU | 891 |
| 230 | 284 | GUAAAGAAGGCCACAUACU | AGUAUGUGGCCUUCUUUAC | 892 |
| 231 | 285 | UAAAGAAGGCCACAUACUU | AAGUAUGUGGCCUUCUUUA | 893 |
| 232 | 286 | AAAGAAGGCCACAUACUUA | UAAGUAUGUGGCCUUCUUU | 894 |
| 233 | 287 | AAGAAGGCCACAUACUUAU | AUAAGUAUGUGGCCUUCUU | 895 |
| 234 | 288 | AGAAGGCCACAUACUUAUC | GAUAAGUAUGUGGCCUUCU | 896 |
| 235 | 289 | GAAGGCCACAUACUUAUCG | CGAUAAGUAUGUGGCCUUC | 897 |
| 236 | 290 | AAGGCCACAUACUUAUCGA | UCGAUAAGUAUGUGGCCUU | 898 |
| 237 | 291 | AGGCCACAUACUUAUCGAG | CUCGAUAAGUAUGUGGCCU | 899 |
| 238 | 292 | GGCCACAUACUUAUCGAGU | ACUCGAUAAGUAUGUGGCC | 900 |
| 239 | 293 | GCCACAUACUUAUCGAGUG | CACUCGAUAAGUAUGUGGC | 901 |
| 240 | 294 | CCACAUACUUAUCGAGUGU | ACACUCGAUAAGUAUGUGG | 902 |
| 241 | 295 | CACAUACUUAUCGAGUGUG | CACACUCGAUAAGUAUGUG | 903 |
| 242 | 296 | ACAUACUUAUCGAGUGUGG | CCACACUCGAUAAGUAUGU | 904 |
| 243 | 297 | CAUACUUAUCGAGUGUGGA | UCCACACUCGAUAAGUAUG | 905 |
| 244 | 298 | AUACUUAUCGAGUGUGGAG | CUCCACACUCGAUAAGUAU | 906 |
| 245 | 299 | UACUUAUCGAGUGUGGAGC | GCUCCACACUCGAUAAGUA | 907 |
| 246 | 300 | ACUUAUCGAGUGUGGAGCU | AGCUCCACACUCGAUAAGU | 908 |
| 247 | 301 | CUUAUCGAGUGUGGAGCUC | GAGCUCCACACUCGAUAAG | 909 |
| 248 | 302 | UUAUCGAGUGUGGAGCUCC | GGAGCUCCACACUCGAUAA | 910 |
| 249 | 303 | UAUCGAGUGUGGAGCUCCG | CGGAGCUCCACACUCGAUA | 911 |
| 250 | 334 | AAGCGCAGCGACCUGUCUA | UAGACAGGUCGCUGCGCUU | 912 |
| 251 | 339 | CAGCGACCUGUCUACUGCU | AGCAGUAGACAGGUCGCUG | 913 |
| 252 | 340 | AGCGACCUGUCUACUGCUG | CAGCAGUAGACAGGUCGCU | 914 |
| 253 | 341 | GCGACCUGUCUACUGCUGU | ACAGCAGUAGACAGGUCGC | 915 |
| 254 | 342 | CGACCUGUCUACUGCUGUG | CACAGCAGUAGACAGGUCG | 916 |
| 255 | 343 | GACCUGUCUACUGCUGUGA | UCACAGCAGUAGACAGGUC | 917 |
| 256 | 344 | ACCUGUCUACUGCUGUGAG | CUCACAGCAGUAGACAGGU | 918 |
| 257 | 345 | CCUGUCUACUGCUGUGAGU | ACUCACAGCAGUAGACAGG | 919 |
| 258 | 346 | CUGUCUACUGCUGUGAGUA | UACUCACAGCAGUAGACAG | 920 |
| 259 | 347 | UGUCUACUGCUGUGAGUAC | GUACUCACAGCAGUAGACA | 921 |
| 260 | 348 | GUCUACUGCUGUGAGUACC | GGUACUCACAGCAGUAGAC | 922 |
| 261 | 349 | UCUACUGCUGUGAGUACCC | GGGUACUCACAGCAGUAGA | 923 |
| 262 | 350 | CUACUGCUGUGAGUACCCU | AGGGUACUCACAGCAGUAG | 924 |
| 263 | 351 | UACUGCUGUGAGUACCCUU | AAGGGUACUCACAGCAGUA | 925 |
| 264 | 352 | ACUGCUGUGAGUACCCUUU | AAAGGGUACUCACAGCAGU | 926 |
| 265 | 353 | CUGCUGUGAGUACCCUUUU | AAAAGGGUACUCACAGCAG | 927 |
| 266 | 354 | UGCUGUGAGUACCCUUUUG | CAAAAGGGUACUCACAGCA | 928 |
| 267 | 355 | GCUGUGAGUACCCUUUUGG | CCAAAAGGGUACUCACAGC | 929 |
| 268 | 356 | CUGUGAGUACCCUUUUGGA | UCCAAAAGGGUACUCACAG | 930 |
| 269 | 357 | UGUGAGUACCCUUUUGGAG | CUCCAAAAGGGUACUCACA | 931 |
| 270 | 358 | GUGAGUACCCUUUUGGAGA | UCUCCAAAAGGGUACUCAC | 932 |
| 271 | 359 | UGAGUACCCUUUUGGAGAC | GUCUCCAAAAGGGUACUCA | 933 |
| 272 | 360 | GAGUACCCUUUUGGAGACG | CGUCUCCAAAAGGGUACUC | 934 |
| 273 | 361 | AGUACCCUUUUGGAGACGG | CCGUCUCCAAAAGGGUACU | 935 |
| 274 | 362 | GUACCCUUUUGGAGACGGG | CCCGUCUCCAAAAGGGUAC | 936 |
| 275 | 369 | UUUGGAGACGGGGUCUUUG | CAAAGACCCCGUCUCCAAA | 937 |
| 276 | 370 | UUGGAGACGGGGUCUUUGG | CCAAAGACCCCGUCUCCAA | 938 |
| 277 | 371 | UGGAGACGGGGUCUUUGGU | ACCAAAGACCCCGUCUCCA | 939 |
| 278 | 373 | GAGACGGGGUCUUUGGUGA | UCACCAAAGACCCCGUCUC | 940 |
| 279 | 374 | AGACGGGGUCUUUGGUGAC | GUCACCAAAGACCCCGUCU | 941 |
| 280 | 375 | GACGGGGUCUUUGGUGACU | AGUCACCAAAGACCCCGUC | 942 |
| 281 | 376 | ACGGGGUCUUUGGUGACUG | CAGUCACCAAAGACCCCGU | 943 |
| 282 | 377 | CGGGGUCUUUGGUGACUGU | ACAGUCACCAAAGACCCCG | 944 |
| 283 | 378 | GGGGUCUUUGGUGACUGUA | UACAGUCACCAAAGACCCC | 945 |
| 284 | 379 | GGGUCUUUGGUGACUGUAG | CUACAGUCACCAAAGACCC | 946 |
| 285 | 380 | GGUCUUUGGUGACUGUAGC | GCUACAGUCACCAAAGACC | 947 |
| 286 | 381 | GUCUUUGGUGACUGUAGCC | GGCUACAGUCACCAAAGAC | 948 |
| 287 | 382 | UCUUUGGUGACUGUAGCCG | CGGCUACAGUCACCAAAGA | 949 |
| 288 | 383 | CUUUGGUGACUGUAGCCGA | UCGGCUACAGUCACCAAAG | 950 |
| 289 | 384 | UUUGGUGACUGUAGCCGAG | CUCGGCUACAGUCACCAAA | 951 |
| 290 | 385 | UUGGUGACUGUAGCCGAGC | GCUCGGCUACAGUCACCAA | 952 |
| 291 | 386 | UGGUGACUGUAGCCGAGCA | UGCUCGGCUACAGUCACCA | 953 |
| 292 | 388 | GUGACUGUAGCCGAGCAGU | ACUGCUCGGCUACAGUCAC | 954 |
| 293 | 389 | UGACUGUAGCCGAGCAGUU | AACUGCUCGGCUACAGUCA | 955 |
| 294 | 390 | GACUGUAGCCGAGCAGUUC | GAACUGCUCGGCUACAGUC | 956 |
| 295 | 391 | ACUGUAGCCGAGCAGUUCC | GGAACUGCUCGGCUACAGU | 957 |
| 296 | 393 | UGUAGCCGAGCAGUUCCCU | AGGGAACUGCUCGGCUACA | 958 |
| 297 | 395 | UAGCCGAGCAGUUCCCUGU | ACAGGGAACUGCUCGGCUA | 959 |
| 298 | 396 | AGCCGAGCAGUUCCCUGUA | UACAGGGAACUGCUCGGCU | 960 |
| 299 | 397 | GCCGAGCAGUUCCCUGUAA | UUACAGGGAACUGCUCGGC | 961 |
| 300 | 398 | CCGAGCAGUUCCCUGUAAC | GUUACAGGGAACUGCUCGG | 962 |
| 301 | 399 | CGAGCAGUUCCCUGUAACG | CGUUACAGGGAACUGCUCG | 963 |
| 302 | 400 | GAGCAGUUCCCUGUAACGU | ACGUUACAGGGAACUGCUC | 964 |
| 303 | 401 | AGCAGUUCCCUGUAACGUA | UACGUUACAGGGAACUGCU | 965 |
| 304 | 402 | GCAGUUCCCUGUAACGUAU | AUACGUUACAGGGAACUGC | 966 |
| 305 | 403 | CAGUUCCCUGUAACGUAUG | CAUACGUUACAGGGAACUG | 967 |
| 306 | 404 | AGUUCCCUGUAACGUAUGU | ACAUACGUUACAGGGAACU | 968 |
| 307 | 405 | GUUCCCUGUAACGUAUGUG | CACAUACGUUACAGGGAAC | 969 |
| 308 | 406 | UUCCCUGUAACGUAUGUGA | UCACAUACGUUACAGGGAA | 970 |
| 309 | 407 | UCCCUGUAACGUAUGUGAG | CUCACAUACGUUACAGGGA | 971 |
| 310 | 408 | CCCUGUAACGUAUGUGAGA | UCUCACAUACGUUACAGGG | 972 |
| 311 | 409 | CCUGUAACGUAUGUGAGAA | UUCUCACAUACGUUACAGG | 973 |
| 312 | 410 | CUGUAACGUAUGUGAGAAA | UUUCUCACAUACGUUACAG | 974 |
| 313 | 411 | UGUAACGUAUGUGAGAAAU | AUUUCUCACAUACGUUACA | 975 |
| 314 | 412 | GUAACGUAUGUGAGAAAUU | AAUUUCUCACAUACGUUAC | 976 |
| 315 | 413 | UAACGUAUGUGAGAAAUUU | AAAUUUCUCACAUACGUUA | 977 |
| 316 | 414 | AACGUAUGUGAGAAAUUUC | GAAAUUUCUCACAUACGUU | 978 |
| 317 | 415 | ACGUAUGUGAGAAAUUUCC | GGAAAUUUCUCACAUACGU | 979 |
| 318 | 416 | CGUAUGUGAGAAAUUUCCG | CGGAAAUUUCUCACAUACG | 980 |
| 319 | 417 | GUAUGUGAGAAAUUUCCGC | GCGGAAAUUUCUCACAUAC | 981 |
| 320 | 418 | UAUGUGAGAAAUUUCCGCG | CGCGGAAAUUUCUCACAUA | 982 |
| 321 | 419 | AUGUGAGAAAUUUCCGCGG | CCGCGGAAAUUUCUCACAU | 983 |
| 322 | 420 | UGUGAGAAAUUUCCGCGGG | CCCGCGGAAAUUUCUCACA | 984 |
| 323 | 421 | GUGAGAAAUUUCCGCGGGC | GCCCGCGGAAAUUUCUCAC | 985 |
| 324 | 422 | UGAGAAAUUUCCGCGGGCU | AGCCCGCGGAAAUUUCUCA | 986 |
| 325 | 423 | GAGAAAUUUCCGCGGGCUG | CAGCCCGCGGAAAUUUCUC | 987 |
| 326 | 424 | AGAAAUUUCCGCGGGCUGG | CCAGCCCGCGGAAAUUUCU | 988 |
| 327 | 426 | AAAUUUCCGCGGGCUGGCU | AGCCAGCCCGCGGAAAUUU | 989 |
| 328 | 434 | GCGGGCUGGCUGAACUUUU | AAAAGUUCAGCCAGCCCGC | 990 |
| 329 | 435 | CGGGCUGGCUGAACUUUUG | CAAAAGUUCAGCCAGCCCG | 991 |
| 330 | 436 | GGGCUGGCUGAACUUUUGA | UCAAAAGUUCAGCCAGCCC | 992 |
| 331 | 437 | GGCUGGCUGAACUUUUGAA | UUCAAAAGUUCAGCCAGCC | 993 |
| 332 | 438 | GCUGGCUGAACUUUUGAAA | UUUCAAAAGUUCAGCCAGC | 994 |
| 333 | 439 | CUGGCUGAACUUUUGAAAG | CUUUCAAAAGUUCAGCCAG | 995 |
| 334 | 440 | UGGCUGAACUUUUGAAAGU | ACUUUCAAAAGUUCAGCCA | 996 |
| 335 | 441 | GGCUGAACUUUUGAAAGUG | CACUUUCAAAAGUUCAGCC | 997 |
| 336 | 442 | GCUGAACUUUUGAAAGUGA | UCACUUUCAAAAGUUCAGC | 998 |
| 337 | 443 | CUGAACUUUUGAAAGUGAG | CUCACUUUCAAAAGUUCAG | 999 |
| 338 | 444 | UGAACUUUUGAAAGUGAGC | GCUCACUUUCAAAAGUUCA | 1000 |
| 339 | 445 | GAACUUUUGAAAGUGAGCG | CGCUCACUUUCAAAAGUUC | 1001 |
| 340 | 446 | AACUUUUGAAAGUGAGCGG | CCGCUCACUUUCAAAAGUU | 1002 |
| 341 | 447 | ACUUUUGAAAGUGAGCGGG | CCCGCUCACUUUCAAAAGU | 1003 |
| 342 | 448 | CUUUUGAAAGUGAGCGGGA | UCCCGCUCACUUUCAAAAG | 1004 |
| 343 | 449 | UUUUGAAAGUGAGCGGGAA | UUCCCGCUCACUUUCAAAA | 1005 |
| 344 | 450 | UUUGAAAGUGAGCGGGAAG | CUUCCCGCUCACUUUCAAA | 1006 |
| 345 | 451 | UUGAAAGUGAGCGGGAAGA | UCUUCCCGCUCACUUUCAA | 1007 |
| 346 | 452 | UGAAAGUGAGCGGGAAGAU | AUCUUCCCGCUCACUUUCA | 1008 |
| 347 | 453 | GAAAGUGAGCGGGAAGAUG | CAUCUUCCCGCUCACUUUC | 1009 |
| 348 | 454 | AAAGUGAGCGGGAAGAUGC | GCAUCUUCCCGCUCACUUU | 1010 |
| 349 | 455 | AAGUGAGCGGGAAGAUGCA | UGCAUCUUCCCGCUCACUU | 1011 |
| 350 | 456 | AGUGAGCGGGAAGAUGCAG | CUGCAUCUUCCCGCUCACU | 1012 |
| 351 | 458 | UGAGCGGGAAGAUGCAGCA | UGCUGCAUCUUCCCGCUCA | 1013 |
| 352 | 464 | GGAAGAUGCAGCAGCGUGA | UCACGCUGCUGCAUCUUCC | 1014 |
| 353 | 465 | GAAGAUGCAGCAGCGUGAU | AUCACGCUGCUGCAUCUUC | 1015 |
| 354 | 466 | AAGAUGCAGCAGCGUGAUU | AAUCACGCUGCUGCAUCUU | 1016 |
| 355 | 467 | AGAUGCAGCAGCGUGAUUG | CAAUCACGCUGCUGCAUCU | 1017 |
| 356 | 468 | GAUGCAGCAGCGUGAUUGG | CCAAUCACGCUGCUGCAUC | 1018 |
| 357 | 469 | AUGCAGCAGCGUGAUUGGA | UCCAAUCACGCUGCUGCAU | 1019 |
| 358 | 470 | UGCAGCAGCGUGAUUGGAA | UUCCAAUCACGCUGCUGCA | 1020 |
| 359 | 471 | GCAGCAGCGUGAUUGGAAG | CUUCCAAUCACGCUGCUGC | 1021 |
| 360 | 472 | CAGCAGCGUGAUUGGAAGA | UCUUCCAAUCACGCUGCUG | 1022 |
| 361 | 473 | AGCAGCGUGAUUGGAAGAC | GUCUUCCAAUCACGCUGCU | 1023 |
| 362 | 474 | GCAGCGUGAUUGGAAGACA | UGUCUUCCAAUCACGCUGC | 1024 |
| 363 | 475 | CAGCGUGAUUGGAAGACAG | CUGUCUUCCAAUCACGCUG | 1025 |
| 364 | 476 | AGCGUGAUUGGAAGACAGC | GCUGUCUUCCAAUCACGCU | 1026 |
| 365 | 477 | GCGUGAUUGGAAGACAGCU | AGCUGUCUUCCAAUCACGC | 1027 |
| 366 | 478 | CGUGAUUGGAAGACAGCUG | CAGCUGUCUUCCAAUCACG | 1028 |
| 367 | 479 | GUGAUUGGAAGACAGCUGU | ACAGCUGUCUUCCAAUCAC | 1029 |
| 368 | 480 | UGAUUGGAAGACAGCUGUA | UACAGCUGUCUUCCAAUCA | 1030 |
| 369 | 481 | GAUUGGAAGACAGCUGUAC | GUACAGCUGUCUUCCAAUC | 1031 |
| 370 | 482 | AUUGGAAGACAGCUGUACA | UGUACAGCUGUCUUCCAAU | 1032 |
| 371 | 483 | UUGGAAGACAGCUGUACAC | GUGUACAGCUGUCUUCCAA | 1033 |
| 372 | 484 | UGGAAGACAGCUGUACACG | CGUGUACAGCUGUCUUCCA | 1034 |
| 373 | 485 | GGAAGACAGCUGUACACGU | ACGUGUACAGCUGUCUUCC | 1035 |
| 374 | 486 | GAAGACAGCUGUACACGUC | GACGUGUACAGCUGUCUUC | 1036 |
| 375 | 487 | AAGACAGCUGUACACGUCA | UGACGUGUACAGCUGUCUU | 1037 |
| 376 | 488 | AGACAGCUGUACACGUCAU | AUGACGUGUACAGCUGUCU | 1038 |
| 377 | 489 | GACAGCUGUACACGUCAUA | UAUGACGUGUACAGCUGUC | 1039 |
| 378 | 490 | ACAGCUGUACACGUCAUAG | CUAUGACGUGUACAGCUGU | 1040 |
| 379 | 491 | CAGCUGUACACGUCAUAGU | ACUAUGACGUGUACAGCUG | 1041 |
| 380 | 492 | AGCUGUACACGUCAUAGUG | CACUAUGACGUGUACAGCU | 1042 |
| 381 | 493 | GCUGUACACGUCAUAGUGG | CCACUAUGACGUGUACAGC | 1043 |
| 382 | 494 | CUGUACACGUCAUAGUGGG | CCCACUAUGACGUGUACAG | 1044 |
| 383 | 495 | UGUACACGUCAUAGUGGGC | GCCCACUAUGACGUGUACA | 1045 |
| 384 | 496 | GUACACGUCAUAGUGGGCC | GGCCCACUAUGACGUGUAC | 1046 |
| 385 | 497 | UACACGUCAUAGUGGGCCC | GGGCCCACUAUGACGUGUA | 1047 |
| 386 | 520 | GGUUGUGGGAAGAGCCAGU | ACUGGCUCUUCCCACAACC | 1048 |
| 387 | 521 | GUUGUGGGAAGAGCCAGUG | CACUGGCUCUUCCCACAAC | 1049 |
| 388 | 522 | UUGUGGGAAGAGCCAGUGG | CCACUGGCUCUUCCCACAA | 1050 |
| 389 | 532 | AGCCAGUGGGCCCGUAAUU | AAUUACGGGCCCACUGGCU | 1051 |
| 390 | 533 | GCCAGUGGGCCCGUAAUUU | AAAUUACGGGCCCACUGGC | 1052 |
| 391 | 534 | CCAGUGGGCCCGUAAUUUU | AAAAUUACGGGCCCACUGG | 1053 |
| 392 | 535 | CAGUGGGCCCGUAAUUUUG | CAAAAUUACGGGCCCACUG | 1054 |
| 393 | 536 | AGUGGGCCCGUAAUUUUGC | GCAAAAUUACGGGCCCACU | 1055 |
| 394 | 537 | GUGGGCCCGUAAUUUUGCU | AGCAAAAUUACGGGCCCAC | 1056 |
| 395 | 538 | UGGGCCCGUAAUUUUGCUG | CAGCAAAAUUACGGGCCCA | 1057 |
| 396 | 539 | GGGCCCGUAAUUUUGCUGA | UCAGCAAAAUUACGGGCCC | 1058 |
| 397 | 540 | GGCCCGUAAUUUUGCUGAG | CUCAGCAAAAUUACGGGCC | 1059 |
| 398 | 541 | GCCCGUAAUUUUGCUGAGC | GCUCAGCAAAAUUACGGGC | 1060 |
| 399 | 542 | CCCGUAAUUUUGCUGAGCC | GGCUCAGCAAAAUUACGGG | 1061 |
| 400 | 543 | CCGUAAUUUUGCUGAGCCU | AGGCUCAGCAAAAUUACGG | 1062 |
| 401 | 544 | CGUAAUUUUGCUGAGCCUA | UAGGCUCAGCAAAAUUACG | 1063 |
| 402 | 545 | GUAAUUUUGCUGAGCCUAG | CUAGGCUCAGCAAAAUUAC | 1064 |
| 403 | 546 | UAAUUUUGCUGAGCCUAGC | GCUAGGCUCAGCAAAAUUA | 1065 |
| 404 | 547 | AAUUUUGCUGAGCCUAGCG | CGCUAGGCUCAGCAAAAUU | 1066 |
| 405 | 548 | AUUUUGCUGAGCCUAGCGA | UCGCUAGGCUCAGCAAAAU | 1067 |
| 406 | 549 | UUUUGCUGAGCCUAGCGAC | GUCGCUAGGCUCAGCAAAA | 1068 |
| 407 | 550 | UUUGCUGAGCCUAGCGACA | UGUCGCUAGGCUCAGCAAA | 1069 |
| 408 | 551 | UUGCUGAGCCUAGCGACAC | GUGUCGCUAGGCUCAGCAA | 1070 |
| 409 | 554 | CUGAGCCUAGCGACACCUA | UAGGUGUCGCUAGGCUCAG | 1071 |
| 410 | 555 | UGAGCCUAGCGACACCUAC | GUAGGUGUCGCUAGGCUCA | 1072 |
| 411 | 556 | GAGCCUAGCGACACCUACU | AGUAGGUGUCGCUAGGCUC | 1073 |
| 412 | 557 | AGCCUAGCGACACCUACUG | CAGUAGGUGUCGCUAGGCU | 1074 |
| 413 | 559 | CCUAGCGACACCUACUGGA | UCCAGUAGGUGUCGCUAGG | 1075 |
| 414 | 560 | CUAGCGACACCUACUGGAA | UUCCAGUAGGUGUCGCUAG | 1076 |
| 415 | 561 | UAGCGACACCUACUGGAAG | CUUCCAGUAGGUGUCGCUA | 1077 |
| 416 | 562 | AGCGACACCUACUGGAAGC | GCUUCCAGUAGGUGUCGCU | 1078 |
| 417 | 564 | CGACACCUACUGGAAGCCU | AGGCUUCCAGUAGGUGUCG | 1079 |
| 418 | 565 | GACACCUACUGGAAGCCUA | UAGGCUUCCAGUAGGUGUC | 1080 |
| 419 | 566 | ACACCUACUGGAAGCCUAG | CUAGGCUUCCAGUAGGUGU | 1081 |
| 420 | 567 | CACCUACUGGAAGCCUAGU | ACUAGGCUUCCAGUAGGUG | 1082 |
| 421 | 568 | ACCUACUGGAAGCCUAGUA | UACUAGGCUUCCAGUAGGU | 1083 |
| 422 | 569 | CCUACUGGAAGCCUAGUAG | CUACUAGGCUUCCAGUAGG | 1084 |
| 423 | 570 | CUACUGGAAGCCUAGUAGA | UCUACUAGGCUUCCAGUAG | 1085 |
| 424 | 571 | UACUGGAAGCCUAGUAGAA | UUCUACUAGGCUUCCAGUA | 1086 |
| 425 | 572 | ACUGGAAGCCUAGUAGAAA | UUUCUACUAGGCUUCCAGU | 1087 |
| 426 | 573 | CUGGAAGCCUAGUAGAAAU | AUUUCUACUAGGCUUCCAG | 1088 |
| 427 | 574 | UGGAAGCCUAGUAGAAAUA | UAUUUCUACUAGGCUUCCA | 1089 |
| 428 | 575 | GGAAGCCUAGUAGAAAUAA | UUAUUUCUACUAGGCUUCC | 1090 |
| 429 | 576 | GAAGCCUAGUAGAAAUAAG | CUUAUUUCUACUAGGCUUC | 1091 |
| 430 | 577 | AAGCCUAGUAGAAAUAAGU | ACUUAUUUCUACUAGGCUU | 1092 |
| 431 | 578 | AGCCUAGUAGAAAUAAGUG | CACUUAUUUCUACUAGGCU | 1093 |
| 432 | 579 | GCCUAGUAGAAAUAAGUGG | CCACUUAUUUCUACUAGGC | 1094 |
| 433 | 580 | CCUAGUAGAAAUAAGUGGU | ACCACUUAUUUCUACUAGG | 1095 |
| 434 | 581 | CUAGUAGAAAUAAGUGGUG | CACCACUUAUUUCUACUAG | 1096 |
| 435 | 582 | UAGUAGAAAUAAGUGGUGG | CCACCACUUAUUUCUACUA | 1097 |
| 436 | 583 | AGUAGAAAUAAGUGGUGGG | CCCACCACUUAUUUCUACU | 1098 |
| 437 | 584 | GUAGAAAUAAGUGGUGGGA | UCCCACCACUUAUUUCUAC | 1099 |
| 438 | 585 | UAGAAAUAAGUGGUGGGAU | AUCCCACCACUUAUUUCUA | 1100 |
| 439 | 586 | AGAAAUAAGUGGUGGGAUG | CAUCCCACCACUUAUUUCU | 1101 |
| 440 | 587 | GAAAUAAGUGGUGGGAUGG | CCAUCCCACCACUUAUUUC | 1102 |
| 441 | 588 | AAAUAAGUGGUGGGAUGGA | UCCAUCCCACCACUUAUUU | 1103 |
| 442 | 589 | AAUAAGUGGUGGGAUGGAU | AUCCAUCCCACCACUUAUU | 1104 |
| 443 | 590 | AUAAGUGGUGGGAUGGAUA | UAUCCAUCCCACCACUUAU | 1105 |
| 444 | 591 | UAAGUGGUGGGAUGGAUAU | AUAUCCAUCCCACCACUUA | 1106 |
| 445 | 592 | AAGUGGUGGGAUGGAUAUC | GAUAUCCAUCCCACCACUU | 1107 |
| 446 | 593 | AGUGGUGGGAUGGAUAUCA | UGAUAUCCAUCCCACCACU | 1108 |
| 447 | 594 | GUGGUGGGAUGGAUAUCAU | AUGAUAUCCAUCCCACCAC | 1109 |
| 448 | 595 | UGGUGGGAUGGAUAUCAUG | CAUGAUAUCCAUCCCACCA | 1110 |
| 449 | 596 | GGUGGGAUGGAUAUCAUGG | CCAUGAUAUCCAUCCCACC | 1111 |
| 450 | 597 | GUGGGAUGGAUAUCAUGGA | UCCAUGAUAUCCAUCCCAC | 1112 |
| 451 | 598 | UGGGAUGGAUAUCAUGGAG | CUCCAUGAUAUCCAUCCCA | 1113 |
| 452 | 599 | GGGAUGGAUAUCAUGGAGA | UCUCCAUGAUAUCCAUCCC | 1114 |
| 453 | 600 | GGAUGGAUAUCAUGGAGAA | UUCUCCAUGAUAUCCAUCC | 1115 |
| 454 | 601 | GAUGGAUAUCAUGGAGAAG | CUUCUCCAUGAUAUCCAUC | 1116 |
| 455 | 602 | AUGGAUAUCAUGGAGAAGA | UCUUCUCCAUGAUAUCCAU | 1117 |
| 456 | 603 | UGGAUAUCAUGGAGAAGAA | UUCUUCUCCAUGAUAUCCA | 1118 |
| 457 | 604 | GGAUAUCAUGGAGAAGAAG | CUUCUUCUCCAUGAUAUCC | 1119 |
| 458 | 605 | GAUAUCAUGGAGAAGAAGU | ACUUCUUCUCCAUGAUAUC | 1120 |
| 459 | 606 | AUAUCAUGGAGAAGAAGUU | AACUUCUUCUCCAUGAUAU | 1121 |
| 460 | 607 | UAUCAUGGAGAAGAAGUUG | CAACUUCUUCUCCAUGAUA | 1122 |
| 461 | 608 | AUCAUGGAGAAGAAGUUGU | ACAACUUCUUCUCCAUGAU | 1123 |
| 462 | 609 | UCAUGGAGAAGAAGUUGUU | AACAACUUCUUCUCCAUGA | 1124 |
| 463 | 610 | CAUGGAGAAGAAGUUGUUG | CAACAACUUCUUCUCCAUG | 1125 |
| 464 | 611 | AUGGAGAAGAAGUUGUUGU | ACAACAACUUCUUCUCCAU | 1126 |
| 465 | 612 | UGGAGAAGAAGUUGUUGUU | AACAACAACUUCUUCUCCA | 1127 |
| 466 | 613 | GGAGAAGAAGUUGUUGUUU | AAACAACAACUUCUUCUCC | 1128 |
| 467 | 614 | GAGAAGAAGUUGUUGUUUU | AAAACAACAACUUCUUCUC | 1129 |
| 468 | 615 | AGAAGAAGUUGUUGUUUUG | CAAAACAACAACUUCUUCU | 1130 |
| 469 | 616 | GAAGAAGUUGUUGUUUUGG | CCAAAACAACAACUUCUUC | 1131 |
| 470 | 617 | AAGAAGUUGUUGUUUUGGA | UCCAAAACAACAACUUCUU | 1132 |
| 471 | 618 | AGAAGUUGUUGUUUUGGAU | AUCCAAAACAACAACUUCU | 1133 |
| 472 | 619 | GAAGUUGUUGUUUUGGAUG | CAUCCAAAACAACAACUUC | 1134 |
| 473 | 620 | AAGUUGUUGUUUUGGAUGA | UCAUCCAAAACAACAACUU | 1135 |
| 474 | 621 | AGUUGUUGUUUUGGAUGAU | AUCAUCCAAAACAACAACU | 1136 |
| 475 | 622 | GUUGUUGUUUUGGAUGAUU | AAUCAUCCAAAACAACAAC | 1137 |
| 476 | 623 | UUGUUGUUUUGGAUGAUUU | AAAUCAUCCAAAACAACAA | 1138 |
| 477 | 640 | UUUUAUGGCUGGUUACCUU | AAGGUAACCAGCCAUAAAA | 1139 |
| 478 | 641 | UUUAUGGCUGGUUACCUUG | CAAGGUAACCAGCCAUAAA | 1140 |
| 479 | 642 | UUAUGGCUGGUUACCUUGG | CCAAGGUAACCAGCCAUAA | 1141 |
| 480 | 643 | UAUGGCUGGUUACCUUGGG | CCCAAGGUAACCAGCCAUA | 1142 |
| 481 | 644 | AUGGCUGGUUACCUUGGGA | UCCCAAGGUAACCAGCCAU | 1143 |
| 482 | 645 | UGGCUGGUUACCUUGGGAU | AUCCCAAGGUAACCAGCCA | 1144 |
| 483 | 646 | GGCUGGUUACCUUGGGAUG | CAUCCCAAGGUAACCAGCC | 1145 |
| 484 | 647 | GCUGGUUACCUUGGGAUGA | UCAUCCCAAGGUAACCAGC | 1146 |
| 485 | 648 | CUGGUUACCUUGGGAUGAU | AUCAUCCCAAGGUAACCAG | 1147 |
| 486 | 649 | UGGUUACCUUGGGAUGAUC | GAUCAUCCCAAGGUAACCA | 1148 |
| 487 | 650 | GGUUACCUUGGGAUGAUCU | AGAUCAUCCCAAGGUAACC | 1149 |
| 488 | 651 | GUUACCUUGGGAUGAUCUA | UAGAUCAUCCCAAGGUAAC | 1150 |
| 489 | 652 | UUACCUUGGGAUGAUCUAC | GUAGAUCAUCCCAAGGUAA | 1151 |
| 490 | 653 | UACCUUGGGAUGAUCUACU | AGUAGAUCAUCCCAAGGUA | 1152 |
| 491 | 654 | ACCUUGGGAUGAUCUACUG | CAGUAGAUCAUCCCAAGGU | 1153 |
| 492 | 655 | CCUUGGGAUGAUCUACUGA | UCAGUAGAUCAUCCCAAGG | 1154 |
| 493 | 656 | CUUGGGAUGAUCUACUGAG | CUCAGUAGAUCAUCCCAAG | 1155 |
| 494 | 657 | UUGGGAUGAUCUACUGAGA | UCUCAGUAGAUCAUCCCAA | 1156 |
| 495 | 658 | UGGGAUGAUCUACUGAGAC | GUCUCAGUAGAUCAUCCCA | 1157 |
| 496 | 659 | GGGAUGAUCUACUGAGACU | AGUCUCAGUAGAUCAUCCC | 1158 |
| 497 | 660 | GGAUGAUCUACUGAGACUG | CAGUCUCAGUAGAUCAUCC | 1159 |
| 498 | 661 | GAUGAUCUACUGAGACUGU | ACAGUCUCAGUAGAUCAUC | 1160 |
| 499 | 662 | AUGAUCUACUGAGACUGUG | CACAGUCUCAGUAGAUCAU | 1161 |
| 500 | 663 | UGAUCUACUGAGACUGUGU | ACACAGUCUCAGUAGAUCA | 1162 |
| 501 | 664 | GAUCUACUGAGACUGUGUG | CACACAGUCUCAGUAGAUC | 1163 |
| 502 | 665 | AUCUACUGAGACUGUGUGA | UCACACAGUCUCAGUAGAU | 1164 |
| 503 | 666 | UCUACUGAGACUGUGUGAC | GUCACACAGUCUCAGUAGA | 1165 |
| 504 | 667 | CUACUGAGACUGUGUGACC | GGUCACACAGUCUCAGUAG | 1166 |
| 505 | 668 | UACUGAGACUGUGUGACCG | CGGUCACACAGUCUCAGUA | 1167 |
| 506 | 669 | ACUGAGACUGUGUGACCGG | CCGGUCACACAGUCUCAGU | 1168 |
| 507 | 670 | CUGAGACUGUGUGACCGGU | ACCGGUCACACAGUCUCAG | 1169 |
| 508 | 671 | UGAGACUGUGUGACCGGUA | UACCGGUCACACAGUCUCA | 1170 |
| 509 | 672 | GAGACUGUGUGACCGGUAU | AUACCGGUCACACAGUCUC | 1171 |
| 510 | 673 | AGACUGUGUGACCGGUAUC | GAUACCGGUCACACAGUCU | 1172 |
| 511 | 674 | GACUGUGUGACCGGUAUCC | GGAUACCGGUCACACAGUC | 1173 |
| 512 | 675 | ACUGUGUGACCGGUAUCCA | UGGAUACCGGUCACACAGU | 1174 |
| 513 | 676 | CUGUGUGACCGGUAUCCAU | AUGGAUACCGGUCACACAG | 1175 |
| 514 | 677 | UGUGUGACCGGUAUCCAUU | AAUGGAUACCGGUCACACA | 1176 |
| 515 | 678 | GUGUGACCGGUAUCCAUUG | CAAUGGAUACCGGUCACAC | 1177 |
| 516 | 679 | UGUGACCGGUAUCCAUUGA | UCAAUGGAUACCGGUCACA | 1178 |
| 517 | 680 | GUGACCGGUAUCCAUUGAC | GUCAAUGGAUACCGGUCAC | 1179 |
| 518 | 681 | UGACCGGUAUCCAUUGACU | AGUCAAUGGAUACCGGUCA | 1180 |
| 519 | 682 | GACCGGUAUCCAUUGACUG | CAGUCAAUGGAUACCGGUC | 1181 |
| 520 | 683 | ACCGGUAUCCAUUGACUGU | ACAGUCAAUGGAUACCGGU | 1182 |
| 521 | 684 | CCGGUAUCCAUUGACUGUA | UACAGUCAAUGGAUACCGG | 1183 |
| 522 | 685 | CGGUAUCCAUUGACUGUAG | CUACAGUCAAUGGAUACCG | 1184 |
| 523 | 686 | GGUAUCCAUUGACUGUAGA | UCUACAGUCAAUGGAUACC | 1185 |
| 524 | 687 | GUAUCCAUUGACUGUAGAG | CUCUACAGUCAAUGGAUAC | 1186 |
| 525 | 688 | UAUCCAUUGACUGUAGAGA | UCUCUACAGUCAAUGGAUA | 1187 |
| 526 | 689 | AUCCAUUGACUGUAGAGAC | GUCUCUACAGUCAAUGGAU | 1188 |
| 527 | 690 | UCCAUUGACUGUAGAGACU | AGUCUCUACAGUCAAUGGA | 1189 |
| 528 | 691 | CCAUUGACUGUAGAGACUA | UAGUCUCUACAGUCAAUGG | 1190 |
| 529 | 692 | CAUUGACUGUAGAGACUAA | UUAGUCUCUACAGUCAAUG | 1191 |
| 530 | 693 | AUUGACUGUAGAGACUAAA | UUUAGUCUCUACAGUCAAU | 1192 |
| 531 | 694 | UUGACUGUAGAGACUAAAG | CUUUAGUCUCUACAGUCAA | 1193 |
| 532 | 695 | UGACUGUAGAGACUAAAGG | CCUUUAGUCUCUACAGUCA | 1194 |
| 533 | 696 | GACUGUAGAGACUAAAGGG | CCCUUUAGUCUCUACAGUC | 1195 |
| 534 | 697 | ACUGUAGAGACUAAAGGGG | CCCCUUUAGUCUCUACAGU | 1196 |
| 535 | 729 | UUUGGCCCGCAGUAUUUUG | CAAAAUACUGCGGGCCAAA | 1197 |
| 536 | 730 | UUGGCCCGCAGUAUUUUGA | UCAAAAUACUGCGGGCCAA | 1198 |
| 537 | 731 | UGGCCCGCAGUAUUUUGAU | AUCAAAAUACUGCGGGCCA | 1199 |
| 538 | 732 | GGCCCGCAGUAUUUUGAUU | AAUCAAAAUACUGCGGGCC | 1200 |
| 539 | 733 | GCCCGCAGUAUUUUGAUUA | UAAUCAAAAUACUGCGGGC | 1201 |
| 540 | 734 | CCCGCAGUAUUUUGAUUAC | GUAAUCAAAAUACUGCGGG | 1202 |
| 541 | 735 | CCGCAGUAUUUUGAUUACC | GGUAAUCAAAAUACUGCGG | 1203 |
| 542 | 736 | CGCAGUAUUUUGAUUACCA | UGGUAAUCAAAAUACUGCG | 1204 |
| 543 | 737 | GCAGUAUUUUGAUUACCAG | CUGGUAAUCAAAAUACUGC | 1205 |
| 544 | 738 | CAGUAUUUUGAUUACCAGC | GCUGGUAAUCAAAAUACUG | 1206 |
| 545 | 739 | AGUAUUUUGAUUACCAGCA | UGCUGGUAAUCAAAAUACU | 1207 |
| 546 | 740 | GUAUUUUGAUUACCAGCAA | UUGCUGGUAAUCAAAAUAC | 1208 |
| 547 | 741 | UAUUUUGAUUACCAGCAAU | AUUGCUGGUAAUCAAAAUA | 1209 |
| 548 | 742 | AUUUUGAUUACCAGCAAUC | GAUUGCUGGUAAUCAAAAU | 1210 |
| 549 | 743 | UUUUGAUUACCAGCAAUCA | UGAUUGCUGGUAAUCAAAA | 1211 |
| 550 | 744 | UUUGAUUACCAGCAAUCAG | CUGAUUGCUGGUAAUCAAA | 1212 |
| 551 | 745 | UUGAUUACCAGCAAUCAGG | CCUGAUUGCUGGUAAUCAA | 1213 |
| 552 | 746 | UGAUUACCAGCAAUCAGGC | GCCUGAUUGCUGGUAAUCA | 1214 |
| 553 | 747 | GAUUACCAGCAAUCAGGCC | GGCCUGAUUGCUGGUAAUC | 1215 |
| 554 | 748 | AUUACCAGCAAUCAGGCCC | GGGCCUGAUUGCUGGUAAU | 1216 |
| 555 | 749 | UUACCAGCAAUCAGGCCCC | GGGGCCUGAUUGCUGGUAA | 1217 |
| 556 | 766 | CCCCAGGAAUGGUACUCCU | AGGAGUACCAUUCCUGGGG | 1218 |
| 557 | 767 | CCCAGGAAUGGUACUCCUC | GAGGAGUACCAUUCCUGGG | 1219 |
| 558 | 768 | CCAGGAAUGGUACUCCUCA | UGAGGAGUACCAUUCCUGG | 1220 |
| 559 | 769 | CAGGAAUGGUACUCCUCAA | UUGAGGAGUACCAUUCCUG | 1221 |
| 560 | 770 | AGGAAUGGUACUCCUCAAC | GUUGAGGAGUACCAUUCCU | 1222 |
| 561 | 771 | GGAAUGGUACUCCUCAACU | AGUUGAGGAGUACCAUUCC | 1223 |
| 562 | 772 | GAAUGGUACUCCUCAACUG | CAGUUGAGGAGUACCAUUC | 1224 |
| 563 | 773 | AAUGGUACUCCUCAACUGC | GCAGUUGAGGAGUACCAUU | 1225 |
| 564 | 774 | AUGGUACUCCUCAACUGCU | AGCAGUUGAGGAGUACCAU | 1226 |
| 565 | 775 | UGGUACUCCUCAACUGCUG | CAGCAGUUGAGGAGUACCA | 1227 |
| 566 | 776 | GGUACUCCUCAACUGCUGU | ACAGCAGUUGAGGAGUACC | 1228 |
| 567 | 777 | GUACUCCUCAACUGCUGUC | GACAGCAGUUGAGGAGUAC | 1229 |
| 568 | 778 | UACUCCUCAACUGCUGUCC | GGACAGCAGUUGAGGAGUA | 1230 |
| 569 | 779 | ACUCCUCAACUGCUGUCCC | GGGACAGCAGUUGAGGAGU | 1231 |
| 570 | 780 | CUCCUCAACUGCUGUCCCA | UGGGACAGCAGUUGAGGAG | 1232 |
| 571 | 781 | UCCUCAACUGCUGUCCCAG | CUGGGACAGCAGUUGAGGA | 1233 |
| 572 | 783 | CUCAACUGCUGUCCCAGCU | AGCUGGGACAGCAGUUGAG | 1234 |
| 573 | 784 | UCAACUGCUGUCCCAGCUG | CAGCUGGGACAGCAGUUGA | 1235 |
| 574 | 785 | CAACUGCUGUCCCAGCUGU | ACAGCUGGGACAGCAGUUG | 1236 |
| 575 | 786 | AACUGCUGUCCCAGCUGUA | UACAGCUGGGACAGCAGUU | 1237 |
| 576 | 787 | ACUGCUGUCCCAGCUGUAG | CUACAGCUGGGACAGCAGU | 1238 |
| 577 | 788 | CUGCUGUCCCAGCUGUAGA | UCUACAGCUGGGACAGCAG | 1239 |
| 578 | 789 | UGCUGUCCCAGCUGUAGAA | UUCUACAGCUGGGACAGCA | 1240 |
| 579 | 790 | GCUGUCCCAGCUGUAGAAG | CUUCUACAGCUGGGACAGC | 1241 |
| 580 | 791 | CUGUCCCAGCUGUAGAAGC | GCUUCUACAGCUGGGACAG | 1242 |
| 581 | 792 | UGUCCCAGCUGUAGAAGCU | AGCUUCUACAGCUGGGACA | 1243 |
| 582 | 793 | GUCCCAGCUGUAGAAGCUC | GAGCUUCUACAGCUGGGAC | 1244 |
| 583 | 794 | UCCCAGCUGUAGAAGCUCU | AGAGCUUCUACAGCUGGGA | 1245 |
| 584 | 795 | CCCAGCUGUAGAAGCUCUC | GAGAGCUUCUACAGCUGGG | 1246 |
| 585 | 796 | CCAGCUGUAGAAGCUCUCU | AGAGAGCUUCUACAGCUGG | 1247 |
| 586 | 797 | CAGCUGUAGAAGCUCUCUA | UAGAGAGCUUCUACAGCUG | 1248 |
| 587 | 798 | AGCUGUAGAAGCUCUCUAU | AUAGAGAGCUUCUACAGCU | 1249 |
| 588 | 799 | GCUGUAGAAGCUCUCUAUC | GAUAGAGAGCUUCUACAGC | 1250 |
| 589 | 800 | CUGUAGAAGCUCUCUAUCG | CGAUAGAGAGCUUCUACAG | 1251 |
| 590 | 801 | UGUAGAAGCUCUCUAUCGG | CCGAUAGAGAGCUUCUACA | 1252 |
| 591 | 802 | GUAGAAGCUCUCUAUCGGA | UCCGAUAGAGAGCUUCUAC | 1253 |
| 592 | 803 | UAGAAGCUCUCUAUCGGAG | CUCCGAUAGAGAGCUUCUA | 1254 |
| 593 | 804 | AGAAGCUCUCUAUCGGAGG | CCUCCGAUAGAGAGCUUCU | 1255 |
| 594 | 805 | GAAGCUCUCUAUCGGAGGA | UCCUCCGAUAGAGAGCUUC | 1256 |
| 595 | 806 | AAGCUCUCUAUCGGAGGAU | AUCCUCCGAUAGAGAGCUU | 1257 |
| 596 | 807 | AGCUCUCUAUCGGAGGAUU | AAUCCUCCGAUAGAGAGCU | 1258 |
| 597 | 808 | GCUCUCUAUCGGAGGAUUA | UAAUCCUCCGAUAGAGAGC | 1259 |
| 598 | 809 | CUCUCUAUCGGAGGAUUAC | GUAAUCCUCCGAUAGAGAG | 1260 |
| 599 | 810 | UCUCUAUCGGAGGAUUACU | AGUAAUCCUCCGAUAGAGA | 1261 |
| 600 | 811 | CUCUAUCGGAGGAUUACUA | UAGUAAUCCUCCGAUAGAG | 1262 |
| 601 | 812 | UCUAUCGGAGGAUUACUAC | GUAGUAAUCCUCCGAUAGA | 1263 |
| 602 | 813 | CUAUCGGAGGAUUACUACU | AGUAGUAAUCCUCCGAUAG | 1264 |
| 603 | 814 | UAUCGGAGGAUUACUACUU | AAGUAGUAAUCCUCCGAUA | 1265 |
| 604 | 815 | AUCGGAGGAUUACUACUUU | AAAGUAGUAAUCCUCCGAU | 1266 |
| 605 | 816 | UCGGAGGAUUACUACUUUG | CAAAGUAGUAAUCCUCCGA | 1267 |
| 606 | 817 | CGGAGGAUUACUACUUUGC | GCAAAGUAGUAAUCCUCCG | 1268 |
| 607 | 818 | GGAGGAUUACUACUUUGCA | UGCAAAGUAGUAAUCCUCC | 1269 |
| 608 | 819 | GAGGAUUACUACUUUGCAA | UUGCAAAGUAGUAAUCCUC | 1270 |
| 609 | 820 | AGGAUUACUACUUUGCAAU | AUUGCAAAGUAGUAAUCCU | 1271 |
| 610 | 821 | GGAUUACUACUUUGCAAUU | AAUUGCAAAGUAGUAAUCC | 1272 |
| 611 | 822 | GAUUACUACUUUGCAAUUU | AAAUUGCAAAGUAGUAAUC | 1273 |
| 612 | 823 | AUUACUACUUUGCAAUUUU | AAAAUUGCAAAGUAGUAAU | 1274 |
| 613 | 824 | UUACUACUUUGCAAUUUUG | CAAAAUUGCAAAGUAGUAA | 1275 |
| 614 | 825 | UACUACUUUGCAAUUUUGG | CCAAAAUUGCAAAGUAGUA | 1276 |
| 615 | 826 | ACUACUUUGCAAUUUUGGA | UCCAAAAUUGCAAAGUAGU | 1277 |
| 616 | 827 | CUACUUUGCAAUUUUGGAA | UUCCAAAAUUGCAAAGUAG | 1278 |
| 617 | 828 | UACUUUGCAAUUUUGGAAG | CUUCCAAAAUUGCAAAGUA | 1279 |
| 618 | 829 | ACUUUGCAAUUUUGGAAGA | UCUUCCAAAAUUGCAAAGU | 1280 |
| 619 | 830 | CUUUGCAAUUUUGGAAGAC | GUCUUCCAAAAUUGCAAAG | 1281 |
| 620 | 831 | UUUGCAAUUUUGGAAGACU | AGUCUUCCAAAAUUGCAAA | 1282 |
| 621 | 832 | UUGCAAUUUUGGAAGACUG | CAGUCUUCCAAAAUUGCAA | 1283 |
| 622 | 833 | UGCAAUUUUGGAAGACUGC | GCAGUCUUCCAAAAUUGCA | 1284 |
| 623 | 834 | GCAAUUUUGGAAGACUGCU | AGCAGUCUUCCAAAAUUGC | 1285 |
| 624 | 835 | CAAUUUUGGAAGACUGCUG | CAGCAGUCUUCCAAAAUUG | 1286 |
| 625 | 836 | AAUUUUGGAAGACUGCUGG | CCAGCAGUCUUCCAAAAUU | 1287 |
| 626 | 837 | AUUUUGGAAGACUGCUGGA | UCCAGCAGUCUUCCAAAAU | 1288 |
| 627 | 838 | UUUUGGAAGACUGCUGGAG | CUCCAGCAGUCUUCCAAAA | 1289 |
| 628 | 839 | UUUGGAAGACUGCUGGAGA | UCUCCAGCAGUCUUCCAAA | 1290 |
| 629 | 840 | UUGGAAGACUGCUGGAGAA | UUCUCCAGCAGUCUUCCAA | 1291 |
| 630 | 841 | UGGAAGACUGCUGGAGAAC | GUUCUCCAGCAGUCUUCCA | 1292 |
| 631 | 842 | GGAAGACUGCUGGAGAACA | UGUUCUCCAGCAGUCUUCC | 1293 |
| 632 | 843 | GAAGACUGCUGGAGAACAA | UUGUUCUCCAGCAGUCUUC | 1294 |
| 633 | 844 | AAGACUGCUGGAGAACAAU | AUUGUUCUCCAGCAGUCUU | 1295 |
| 634 | 845 | AGACUGCUGGAGAACAAUC | GAUUGUUCUCCAGCAGUCU | 1296 |
| 635 | 846 | GACUGCUGGAGAACAAUCC | GGAUUGUUCUCCAGCAGUC | 1297 |
| 636 | 847 | ACUGCUGGAGAACAAUCCA | UGGAUUGUUCUCCAGCAGU | 1298 |
| 637 | 848 | CUGCUGGAGAACAAUCCAC | GUGGAUUGUUCUCCAGCAG | 1299 |
| 638 | 849 | UGCUGGAGAACAAUCCACG | CGUGGAUUGUUCUCCAGCA | 1300 |
| 639 | 850 | GCUGGAGAACAAUCCACGG | CCGUGGAUUGUUCUCCAGC | 1301 |
| 640 | 851 | CUGGAGAACAAUCCACGGA | UCCGUGGAUUGUUCUCCAG | 1302 |
| 641 | 852 | UGGAGAACAAUCCACGGAG | CUCCGUGGAUUGUUCUCCA | 1303 |
| 642 | 853 | GGAGAACAAUCCACGGAGG | CCUCCGUGGAUUGUUCUCC | 1304 |
| 643 | 854 | GAGAACAAUCCACGGAGGU | ACCUCCGUGGAUUGUUCUC | 1305 |
| 644 | 855 | AGAACAAUCCACGGAGGUA | UACCUCCGUGGAUUGUUCU | 1306 |
| 645 | 856 | GAACAAUCCACGGAGGUAC | GUACCUCCGUGGAUUGUUC | 1307 |
| 646 | 857 | AACAAUCCACGGAGGUACC | GGUACCUCCGUGGAUUGUU | 1308 |
| 647 | 858 | ACAAUCCACGGAGGUACCC | GGGUACCUCCGUGGAUUGU | 1309 |
| 648 | 860 | AAUCCACGGAGGUACCCGA | UCGGGUACCUCCGUGGAUU | 1310 |
| 649 | 861 | AUCCACGGAGGUACCCGAA | UUCGGGUACCUCCGUGGAU | 1311 |
| 650 | 869 | AGGUACCCGAAGGCCGAUU | AAUCGGCCUUCGGGUACCU | 1312 |
| 651 | 870 | GUACCCGAAGGCCGAUUUG | AAAUCGGCCUUCGGGUACC | 1313 |
| 652 | 871 | UACCCGAAGGCCGAUUUGA | CAAAUCGGCCUUCGGGUAC | 1314 |
| 653 | 872 | ACCCGAAGGCCGAUUUGAA | UCAAAUCGGCCUUCGGGUA | 1315 |
| 654 | 873 | CCCGAAGGCCGAUUUGAAG | UUCAAAUCGGCCUUCGGGU | 1316 |
| 655 | 874 | CCGAAGGCCGAUUUGAAGC | CUUCAAAUCGGCCUUCGGG | 1317 |
| 656 | 875 | CGAAGGCCGAUUUGAAGCA | GCUUCAAAUCGGCCUUCGG | 1318 |
| 657 | 876 | GAAGGCCGAUUUGAAGCAG | UGCUUCAAAUCGGCCUUCG | 1319 |
| 658 | 877 | AAGGCCGAUUUGAAGCAGU | CUGCUUCAAAUCGGCCUUC | 1320 |
| 659 | 878 | AGGCCGAUUUGAAGCAGUG | ACUGCUUCAAAUCGGCCUU | 1321 |
| 660 | 879 | GGCCGAUUUGAAGCAGUGG | CACUGCUUCAAAUCGGCCU | 1322 |
| 661 | 880 | GCCGAUUUGAAGCAGUGGA | CCACUGCUUCAAAUCGGCC | 1323 |
| 662 | 881 | CCGAUUUGAAGCAGUGGAC | UCCACUGCUUCAAAUCGGC | 1324 |
| 663 | 882 | CGAUUUGAAGCAGUGGACC | GUCCACUGCUUCAAAUCGG | 1325 |
| 664 | 883 | GAUUUGAAGCAGUGGACCC | GGUCCACUGCUUCAAAUCG | 1326 |
| 665 | 884 | AUUUGAAGCAGUGGACCCA | GGGUCCACUGCUUCAAAUC | 1327 |
| 666 | 885 | UUUGAAGCAGUGGACCCAC | UGGGUCCACUGCUUCAAAU | 1328 |
| 667 | 886 | UUGAAGCAGUGGACCCACC | GUGGGUCCACUGCUUCAAA | 1329 |
| 668 | 887 | ACCCACCCUGUGCCCUUUU | GGUGGGUCCACUGCUUCAA | 1330 |
| 669 | 899 | ACCCUGUGCCCUUUUCCCA | AAAAGGGCACAGGGUGGGU | 1331 |
| 670 | 903 | CCCUGUGCCCUUUUCCCAU | UGGGAAAAGGGCACAGGGU | 1332 |
| 671 | 904 | CCUGUGCCCUUUUCCCAUA | AUGGGAAAAGGGCACAGGG | 1333 |
| 672 | 905 | CUGUGCCCUUUUCCCAUAU | UAUGGGAAAAGGGCACAGG | 1334 |
| 673 | 906 | UGUGCCCUUUUCCCAUAUA | AUAUGGGAAAAGGGCACAG | 1335 |
| 674 | 907 | GUGCCCUUUUCCCAUAUAA | UAUAUGGGAAAAGGGCACA | 1336 |
| 675 | 908 | UGCCCUUUUCCCAUAUAAA | UUAUAUGGGAAAAGGGCAC | 1337 |
| 676 | 909 | CCCAUAUAAAAUAAAUUAC | UUUAUAUGGGAAAAGGGCA | 1338 |
| 677 | 918 | GUACCCGAAGGCCGAUUUG | GUAAUUUAUUUUAUAUGGG | 1339 |

#indicates start position

### Example 2

### Porcine Circovirus Sequences

[0442] In addition to the example dsRNAs targeting the ref gene of Example 1, the complete genomes of several PCV1 are available for consideration. Targets can be selected as in Example 1.

AY193712.1: 47-985 PCV1 strain PCV1, complete
genome:
ATGCCAAGCAAGAAAAGCGGCCCGCAACCCCATAAGAGGTGGGTGTTC
ACCCTTAATAATCCTTCCGAGGAGGAGAAAAACAAAATACGGGAGCTT
CCAATCTCCCTTTTTGATTATTTTGTTTGCGGAGAGGAAGGTTTGGAA
GAGGGTAGAACTCCTCACCTCCAGGGGTTTGCGAATTTTGCTAAGAAG
CAGACTTTTAACAAGGTGAAGTGGTATTTTGGTGCCCGCTGCCACATC
GAGAAAGCGAAAGGAACCGACCAGCAGAATAAAGAATACTGCAGTAAA
GAAGGCCACATACTTATCGAGTGTGGAGCTCCGCGGAACCAGGGGAAG
CGCAGCGACCTGTCTACTGCTGTGAGTACCCTTTTGGAGACGGGGTCT
TTGGTGACTGTAGCCGAGCAGTTCCCTGTAACGTATGTGAGAAATTTC
CGCGGGCTGGCTGAACTTTTGAAAGTGAGCGGGAAGATGCAGCAGCGT
GATTGGAAGACAGCTGTACACGTCATAGTGGGCCCGCCCGGTTGTGGG
AAGAGCCAGTGGGCCCGTAATTTTGCTGAGCCTAGCGACACCTACTGG
AAGCCTAGTAGAAATAAGTGGTGGGATGGATATCATGGAGAAGAAGTT
GTTGTTTTGGATGATTTTTATGGCTGGTTACCTTGGGATGATCTACTG
AGACTGTGTGACCGGTATCCATTGACTGTAGAGACTAAAGGGGGTACT
GTTCCTTTTTTGGCCCGCAGTATTTTGATTACCAGCAATCAGGCCCCC
CAGGAATGGTACTCCTCAACTGCTGTCCCAGCTGTAGAAGCTCTCTAT
CGGAGGATTACTACTTTGCAATTTTGGAAGACTGCTGGAGAACAATCC
ACGGAGGTACCCGAAGGCCGATTTGAAGCAGTGGACCCACCCTGTGCC
CTTTTCCCATATAAAATAAATTACTGA
(SEQ ID NO: 1340)
EF533941.1: 819-1757 PCV1 strain HZ2006, complete
genome
ATGCCAAGCAAGAAAAGCGGCCCGCAACCCCATAAGAGGTGGGTGTTC
ACCCTTAATAATCCTTCCGAGGAGGAGAAAAACAAAATACGGGAGCTT
CCAATCTCCCTTTTTGATTATTTTGTTTGCGGAGAGGAAGGTTTGGAA
GAGGGTAGAACTCCTCACCTCCAGGGGTTTGCGAATTTTGCTAAGAAG
CAGACTTTTAACAAGGTGAAGTGGTATTTTGGTGCCCGCTGCCACATC
GAGAAAGCGAAAGGAACCGACCAGCAGAATAAAGAATACTGCAGTAAA
GAAGGCCACATACTTATCGAGTGTGGAGCTCCGCGGAACCAGGGGAAG
CGCAGCGACCTGTCTACTGCTGTGAGTACCCTTTTGGAGACGGGGTCT
TTGGTGACTGTAGCCGAGCAGTCCCCTGTAACGTATGTGAGAAATTTC
CGCGGGCTGGCTGAACTTTTGAAAGTGAGCGGGAAGATGCAGCAGCGT
GATTGGAAGACAGCTGTACACGTCATAGTGGGCCCGCCCGGTTGTGGG
AAGAGCCAGTGGGCCCGTAATTTTGCTGAGCCTAGCGACACCTACTGG
AAGCCTAGTAGAAATAAGTGGTGGGATGGATATCATGGAGAAGAAGTT
GTTGTTTTGGATGATTTTTATGGCTGGTTACCTTGGGATGATCTACTG
AGACTGTGTGACCGGTATCCATTGACTGTAGAGACTAAAGGGGGTACT
GTTCCTTTTTTGGCCCGCAGTATTTTGATTACCAGCAATCAGGCCCCC
CAGGAATGGTACTCCTCAACTGCTGTCCCAGCTGTAGAAGCTCTCTAT
CGGAGGATTACTACTTTGCAATTTTGGAAGACTGCTGGAGAACAATCC
ACGGAGGTACCCGAAGGCCGATTTGAAGCAGTGGACCCACCCTGTGCC
CTTTTCCCATATAAAATAAATTACTGA
(SEQ ID NO: 1341)
FJ475129.2: 47-985 PCV1 strain BJ-1, complete
genome
ATGCCAAGCAAGAAAAGCGGCCCGCAACCCCATAAGAGGTGGGTGTTC
ACCCTTAATAATCCTTCCGAGGAGGAGAAAAACAAAATACGGGAGCTT
CCAATCTCCCTTTTTGATTATTTTGTTTGCGGAGAGGAAGGTTTGGAA
GAGGGTAGAACTCCTCACCTCCAGGGGTTTGCGAATTTTGCTAAGAAG
CAGACTTTTAACAAGGTGAAGTGGTATTTTGGTGCCCGCTGCCACATC
GAGAAAGCGAAAGGAACCGACCAGCAGAATAAAGAATACTGCAGTAAA
GAAGGCCACATACTTATCGAGTGTGGAGCTCCGCGGAACCAGGGGAAG
CGCAGCGACCTGTCTACTGCTGTGAGTACCCTTTTGGAGACGGGGTCT
TTGGTGACTGTAGCCGAGCAGTTCCCTGTAACGTATGTGAGAAATTTC
CGCGGGCTGGCTGAACTTTTGAAAGTGAGCGGGAAGATGCAGCAGCGT
GATTGGAAGACAGCTGTACACGTCATAGTGGGCCCGCCCGGTTGTGGG
AAGAGCCAGTGGGCCCGTAATTTTGCTGAGCCTAGCGACACCTACTGG
AAGCCTAGTAGAAATAAGTGGTGGGATGGATATCATGGAGAAGAAGTT
GTTGTTTTGGATGATTTTTATGGCTGGTTACCTTGGGATGATCTACTG
AGACTGTGTGACCGGTATCCATTGACTGTAGAGACTAAAGGGGGTACT
GTTCCTTTTTTGGCCCGCAGTATTTTGATTACCAGCAATCAGGCCCCC
CAGGAATGGTACTCCTCAACTGCTGTCCCAGCTGTAGAAGCTCTCTAT
CGGAGGATTACTACTTTGCAATTTTGGAAGACTGCTGGAGAACAATCC
ACGGAGGTACCCGAAGGCCGATTTGAAGCAGTGGACCCACCCTGTGCC
CTTTTCCCATATAAAATAAATTACTGA
(SEQ ID NO: 1342)
GU371908.1: 47-985 PCV1 isolate Tian Jin,
complete genome
ATGCCAAGCAAGAAAAGCGGCCCGCAACCCCATAAGAGGTGGGTGTTC
ACCCTTAATAATCCTTCCGAGGAGGAGAAAAACAAAATACGGGAGCTT
CCAATCTCCCTTTTTGATTATTTTGTTTGCGGAGAGGAAGGTTTGGAA
GAGGGTAGAACTCCTCACCTCCAGGGGTTTGCGAATTTTGCTAAGAAG
CAGACTTTTAACAAGGTGAAGTGGTATTTTGGTGCCCGCTGCCACATC
GAGAAAGCGAAAGGAACCGACCAGCAGAATAAAGAATACTGCAGTAAA
GAAGGCCACATACTTATCGAGTGTGGAGCTCCGCGGAACCAGGGGAAG
CGCAGCGACCTGTCTACTGCTGTGAGTACCCTTTTGGAGACGGGGTCT
TTGGTGACTGTAGCCGAGCAGTTCCCTGTAACGTATGTGAGAAATTTC
CGCGGGTTGGCTGAACTTTTGAAAGTGAGCGGGAAGATGCAGCAGCGT
GATTGGAAGACAGCTGTACACGTCATAGTGGGCCCGCCCGGTTGTGGG
AAGAGCCAGTGGGCCCGTAATTTTGCTGAGCCTAGCGACACCTACTGG
AAGCCTAGTAGAAATAAGTGGTGGGATGGATATCATGGAGAAGAAGTT
GTTGTTTTGGATGATTTTTATGGCTGGTTACCTTGGGATGATCTACTG
AGACTGTGTGACCGGTATCCATTGACTGTAGAGACTAAAGGGGGTACT
GTTCCTTTTTTGGCCCGCAGTATTTTGATTACCAGCAATCAGGCCCCC
CAGGAATGGTACTCCTCAACTGCTGTCCCAGCTGTAGAAGCTCTCTAT
CGGAGGATTACTACTTTGCAATTTTGGAAGACTGCTGGAGAACAATCC
ACGGAGGTACCCGAAGGCCGATTTGAAGCAGTGGACCCACCCTGTGCC
CTTTTCCCATATAAAATAAATTACTGA
(SEQ ID NO: 1343)
GU722334.1: 47-985 PCV1 isolate Jiangsu,
complete genome
ATGCCAAGCAAGAAAAGCGGCCCGCAACCCCATAAGAGGTGGGTGTTC
ACCCTTAATAATCCTTCCGAGGAGGAGAAAAACAAAATACGGGAGCTT
CCAATCTCCCTTTTTGATTATTTTGTTTGCGGAGAGGAAGGTTTGGAA
GAGGGTAGAACTCCTCACCTCCAGGGGTTTGCGAATTTTGCTAAGAAG
CAGACTTTTAACAAGGTGAAGTGGTATTTTGGTGCCCGCTGCCACATC
GAGAAAGCGAAAGGAACCGACCACCGGAATAAAGAATACTGCAGTAAA
GAAGGCCACATACTTATCGAGTGTGGAGCTCCGCGGAACCAGGGGAAG
CGCAGCGACCTGTCTACTGCTGTGAGTACCCTTTTGGAGACGGGGTCT
TTGGTGACTGTAGCCGAGCAGTTCCCTGTAACGTATGTGAGAAATTTC
CGCGGGCTGGCTGAACTTTAGAAAGTGAGCGGGAAGATGCAGCAGCGT
GATTGGAAGACAGCTGTACACGTCATAGTGGGCCCGCCCGGTTGTGGG
AAGAGCCAGTGGGCCCGTAATTTTGCTGAGCCTAGCGACACCTACTGG
AAGCCTAGTAGAAATAAGTGGTGGGATGGATATCATGGAGAAGAAGTT
GTTGTTTTGGATGATTTTTATGGCTGGTTACCTTGGGATGATCTACTA
GAACTGTGTGACCGGTATCCATTGACTGTAGAGACTAAAGGCGGTACT
GTTCCTTTTTTGGCCCGCAGTATTTTGATTACCAGCAATCAGGCCCCC
CAGGAATGGTACTCCTCAACTGCTGTCCCAGCTGTAGAAGCTCTCTAT
CGGAGGATTACTACTTTGCAATTTTGGAAGACTGCTGGAGAACAATCC
ACGGAGGTACCCGAAGGCCGATTTGAAGCAGTGGACCCACCCTGTGCC
CTTTTCCCATATAAAATAAATTACTGA
(SEQ ID NO: 1344)

### Example 3

### Target Gene Vesivirus

TABLE 3
Sense and antisense strand sequences of dsRNA against vesivirus 2117

| SEQ ID | Sense (3′ to 5′) | AntiSense (5′ to 3′) | SEQ ID |
|---|---|---|---|
| 1445 | AUCUGGCUAGCUACUAUUC | GAAUAGUAGCUAGCCAGAU | 1500 |
| 1446 | GCUAGCUACUAUUCUACAG | CUGUAGAAUAGUAGCUAGC | 1501 |
| 1447 | UGCUUUCCGGAUUACUUAG | CUAAGUAAUCCGGAAAGCA | 1502 |
| 1448 | GCUUUCCGGAUUACUUAGA | UCUAAGUAAUCCGGAAAGC | 1503 |
| 1449 | UCCGGAUUACUUAGAUUCC | GGAAUCUAAGUAAUCCGGA | 1504 |
| 1450 | CCGGAUUACUUAGAUUCCC | GGGAAUCUAAGUAAUCCGG | 1505 |
| 1451 | GUAUAUCUACGAAGGCGAC | GUCGCCUUCGUAGAUAUAC | 1506 |
| 1452 | UAUAUCUACGAAGGCGACG | CGUCGCCUUCGUAGAUAUA | 1507 |
| 1453 | AUAUCUACGAAGGCGACGA | UCGUCGCCUUCGUAGAUAU | 1508 |
| 1454 | UAUCUACGAAGGCGACGAA | UUCGUCGCCUUCGUAGAUA | 1509 |
| 1455 | ACGAACCCUACAUCGUUCU | AGAACGAUGUAGGGUUCGU | 1510 |
| 1456 | GAACCCUACAUCGUUCUAA | UUAGAACGAUGUAGGGUUC | 1511 |
| 1457 | AACCCUACAUCGUUCUAAA | UUUAGAACGAUGUAGGGUU | 1512 |
| 1458 | ACCAAUUGGAGUCGUCAAC | GUUGACGACUCCAAUUGGU | 1513 |
| 1459 | CCAAUUGGAGUCGUCAACU | AGUUGACGACUCCAAUUGG | 1514 |
| 1460 | CAAUUGGAGUCGUCAACUU | AAGUUGACGACUCCAAUUG | 1515 |
| 1461 | CACUUUCACUUACCCUAUA | UAUAGGGUAAGUGAAAGUG | 1516 |
| 1462 | ACUUUCACUUACCCUAUAC | GUAUAGGGUAAGUGAAAGU | 1517 |
| 1463 | UACACCACCGUCAAUUGGU | ACCAAUUGACGGUGGUGUA | 1518 |
| 1464 | CUAUGGAGAUUCGCUUCAC | GUGAAGCGAAUCUCCAUAG | 1519 |
| 1465 | GCCGGAGUGAAACUAAAUA | UAUUUAGUUUCACUCCGGC | 1520 |
| 1466 | AUGGUUGGCCCGACUAUUA | UAAUAGUCGGGCCAACCAU | 1521 |
| 1467 | CGACUAUUACGGUCGAAAC | GUUUCGACCGUAAUAGUCG | 1522 |
| 1468 | GACUAUUACGGUCGAAACA | UGUUUCGACCGUAAUAGUC | 1523 |
| 1469 | ACUAUUACGGUCGAAACAU | AUGUUUCGACCGUAAUAGU | 1524 |
| 1470 | CUAUUACGGUCGAAACAUC | GAUGUUUCGACCGUAAUAG | 1525 |
| 1471 | UAUUACGGUCGAAACAUCA | UGAUGUUUCGACCGUAAUA | 1526 |
| 1472 | CUUUGGCGAGGUUAGUGAA | UUCACUAACCUCGCCAAAG | 1527 |
| 1473 | UUUGGCGAGGUUAGUGAAG | CUUCACUAACCUCGCCAAA | 1528 |
| 1474 | AACUGUUGUUCCUUACCGU | ACGGUAAGGAACAACAGUU | 1529 |
| 1475 | CGCUAAGAACUCUACAAUA | UAUUGUAGAGUUCUUAGCG | 1530 |
| 1476 | AGGUAAUUUCUACGUCGGA | UCCGACGUAGAAAUUACCU | 1531 |
| 1477 | AUUUCUACGUCGGAGGCAA | UUGCCUCCGACGUAGAAAU | 1532 |
| 1478 | UACGUCGGAGGCAACUUUA | UAAAGUUGCCUCCGACGUA | 1533 |
| 1479 | UACCCAACAAGGUAACGUG | CACGUUACCUUGUUGGGUA | 1534 |
| 1480 | AGGUAACGUGGUUGUCUAU | AUAGACAACCACGUUACCU | 1535 |
| 1481 | UGGUGGUAACUAUCCUAUU | AAUAGGAUAGUUACCACCA | 1536 |
| 1482 | AUGUUACUGAAUUUCCGGC | GCCGGAAAUUCAGUAACAU | 1537 |
| 1483 | UGUUACUGAAUUUCCGGCA | UGCCGGAAAUUCAGUAACA | 1538 |
| 1484 | GUUACUGAAUUUCCGGCAG | CUGCCGGAAAUUCAGUAAC | 1539 |
| 1485 | UUACUGAAUUUCCGGCAGC | GCUGCCGGAAAUUCAGUAA | 1540 |
| 1486 | CCACGAGUCUACAAUUCAC | GUGAAUUGUAGACUCGUGG | 1541 |
| 1487 | UUGCACAAGAUGUGUACGA | UCGUACACAUCUUGUGCAA | 1542 |
| 1488 | CUGGUAACUGGUUCGAUAU | AUAUCGAACCAGUUACCAG | 1543 |
| 1489 | UGGUAACUGGUUCGAUAUU | AAUAUCGAACCAGUUACCA | 1544 |
| 1490 | GGUAACUGGUUCGAUAUUG | CAAUAUCGAACCAGUUACC | 1545 |
| 1491 | GUAACUGGUUCGAUAUUGG | CCAAUAUCGAACCAGUUAC | 1546 |
| 1492 | UAACUGGUUCGAUAUUGGC | GCCAAUAUCGAACCAGUUA | 1547 |
| 1493 | AACUGGUUCGAUAUUGGCA | UGCCAAUAUCGAACCAGUU | 1548 |
| 1494 | GGUUCGAUAUUGGCAUAUC | GAUAUGCCAAUAUCGAACC | 1549 |
| 1495 | GUUCGAUAUUGGCAUAUCG | CGAUAUGCCAAUAUCGAAC | 1550 |
| 1496 | UUCGAUAUUGGCAUAUCGU | ACGAUAUGCCAAUAUCGAA | 1551 |
| 1497 | UCGAUAUUGGCAUAUCGUG | CACGAUAUGCCAAUAUCGA | 1552 |
| 1498 | CGAUAUUGGCAUAUCGUGU | ACACGAUAUGCCAAUAUCG | 1553 |
| 1499 | AUAUUGGCAUAUCGUGUGA | UCACACGAUAUGCCAAUAU | 1554 |

### Example 4

### Genes Targeting Sialic Acid Pathways in Avian Cells

[0444] Target genes can be those involved in reducing sialic acid from the host cell surface, which reduces virus binding, and therefore increases recovery of the virus in cell culture media. These targets include: solute carrier family 35 (CMP-sialic acid transporter) member A1 (SLC35A1), avian target gene in Table 8; UDP-N-acetylglucosamine 2-epimerase/N-acetylmannosamine kinase (GNE), avian target gene in Table 7; cytidine monophospho-N-acetylneuraminic acid synthetase (Cmas), avian target gene in Table 6; UDP-Gal:betaGlcNAc beta 1,4-galactosyltransferase (B4GalT1), avian target gene in Table 4; and UDP-Gal:betaGlcNAc beta 1,4-galactosyltransferase, polypeptide 6 (B4GalT6), avian target gene in Table 5.

TABLE 4
Chicken B4GALT1

| SEQ ID NO: | # | Sense (3′ to 5′) | AntiSense (5′ to 3′) | SEQ ID NO: |
|---|---|---|---|---|
| 1555 | 106 | CGUUUUGCUCCAAAGGACU | AGUCCUUUGGAGCAAAACG | 1579 |
| 1556 | 136 | CAGAAAGUAGCAAUCAUCA | UGAUGAUUGCUACUUUCUG | 1580 |
| 1557 | 222 | GCAGCAGCUAGAUUAUGGA | UCCAUAAUCUAGCUGCUGC | 1581 |
| 1558 | 226 | CAGCUAGAUUAUGGAGUGU | ACACUCCAUAAUCUAGCUG | 1582 |
| 1559 | 267 | CGAAGAAUUUAACCGUGCU | AGCACGGUUAAAUUCUUCG | 1583 |
| 1560 | 268 | GAAGAAUUUAACCGUGCUA | UAGCACGGUUAAAUUCUUC | 1584 |
| 1561 | 298 | GUAGGAUUCACGGAAGCUU | AAGCUUCCGUGAAUCCUAC | 1585 |
| 1562 | 373 | GAUGACAGGAACACCUACA | UGUAGGUGUUCCUGUCAUC | 1586 |
| 1563 | 387 | CUACAAGUGCUACAGCCAA | UUGGCUGUAGCACUUGUAG | 1587 |
| 1564 | 423 | CUCCAUGGAUAAAUUCGGA | UCCGAAUUUAUCCAUGGAG | 1588 |
| 1565 | 425 | CCAUGGAUAAAUUCGGAUU | AAUCCGAAUUUAUCCAUGG | 1589 |
| 1566 | 430 | GAUAAAUUCGGAUUUCGGU | ACCGAAAUCCGAAUUUAUC | 1590 |
| 1567 | 439 | GGAUUUCGGUUACCCUACA | UGUAGGGUAACCGAAAUCC | 1591 |
| 1568 | 440 | GAUUUCGGUUACCCUACAA | UUGUAGGGUAACCGAAAUC | 1592 |
| 1569 | 445 | CGGUUACCCUACAAUCAGU | ACUGAUUGUAGGGUAACCG | 1593 |
| 1570 | 460 | CAGUAUUUUGGAGGUGUGU | ACACACCUCCAAAAUACUG | 1594 |
| 1571 | 462 | GUAUUUUGGAGGUGUGUCU | AGACACACCUCCAAAAUAC | 1595 |
| 1572 | 479 | CUGCCUUGAGCAAAGAACA | UGUUCUUUGCUCAAGGCAG | 1596 |
| 1573 | 488 | GCAAAGAACAAUUCACGAA | UUCGUGAAUUGUUCUUUGC | 1597 |
| 1574 | 493 | GAACAAUUCACGAAGAUCA | UGAUCUUCGUGAAUUGUUC | 1598 |
| 1575 | 510 | CAAUGGGUUCCCAAACAAU | AUUGUUUGGGAACCCAUUG | 1599 |
| 1576 | 607 | GCUGUCAUUGGGAAAUGCA | UGCAUUUCCCAAUGACAGC | 1600 |
| 1577 | 669 | GGAGAGGUUUGACCGUAUU | AAUACGGUCAAACCUCUCC | 1601 |
| 1578 | 777 | GAUCACAGUGGAUAUCGGA | UCCGAUAUCCACUGUGAUC | 1602 |

#indicates start position

TABLE 5
Chicken B4GALT6

| SEQ ID NO: | # | Sense (3′ to 5′) | AntiSense (5′ to 3′) | SEQ ID NO: |
|---|---|---|---|---|
| 1603 | 379 | CGGCAUAGCAAAUACAUAU | AUAUGUAUUUGCUAUGCCG | 1627 |
| 1604 | 419 | GGUAUAAUGUUGAGAGAAA | UUUCUCUCAACAUUAUACC | 1628 |
| 1605 | 455 | CACAUGAUCAGAUUGUAUA | UAUACAAUCUGAUCAUGUG | 1629 |
| 1606 | 463 | CAGAUUGUAUACUAACAAA | UUUGUUAGUAUACAAUCUG | 1630 |
| 1607 | 530 | GACUGUGUUGCUCAAACAA | UUGUUUGAGCAACACAGUC | 1631 |
| 1608 | 609 | CUUACAUGAGAGGCCUUAU | AUAAGGCCUCUCAUGUAAG | 1632 |
| 1609 | 613 | CAUGAGAGGCCUUAUUGAU | AUCAAUAAGGCCUCUCAUG | 1633 |
| 1610 | 618 | GAGGCCUUAUUGAUGUAAA | UUUACAUCAAUAAGGCCUC | 1634 |
| 1611 | 640 | GAGUGAAAUUAGUUUUGAU | AUCAAAACUAAUUUCACUC | 1635 |
| 1612 | 751 | CAUCAUUCCUUUUCGUAAU | AUUACGAAAAGGAAUGAUG | 1636 |
| 1613 | 798 | GGCAUCUGAUACCGAUGUU | AACAUCGGUAUCAGAUGCC | 1637 |
| 1614 | 859 | GACAGGUACACAACCUUUU | AAAAGGUUGUGUACCUGUC | 1638 |
| 1615 | 869 | CAACCUUUUAAUCGUGCAA | UUGCACGAUUAAAAGGUUG | 1639 |
| 1616 | 969 | CUGAAAAUGACCGAAAUUA | UAAUUUCGGUCAUUUUCAG | 1640 |
| 1617 | 977 | GACCGAAAUUAUUACGGAU | AUCCGUAAUAAUUUCGGUC | 1641 |
| 1618 | 998 | GGAGAAAUGCCACGUCAUU | AAUGACGUGGCAUUUCUCC | 1642 |
| 1619 | 1083 | GACUGACAGUGGAACAAUU | AAUUGUUCCACUGUCAGUC | 1643 |
| 1620 | 1102 | CAAGAAGAUUAAUGGAUUU | AAAUCCAUUAAUCUUCUUG | 1644 |
| 1621 | 1177 | CUAUGCUGGAUACAACGUA | UACGUUGUAUCCAGCAUAG | 1645 |
| 1622 | 1181 | GCUGGAUACAACGUAACAA | UUGUUACGUUGUAUCCAGC | 1646 |
| 1623 | 1205 | GAGGGAGACUUAGGGAAAU | AUUUCCCUAAGUCUCCCUC | 1647 |
| 1624 | 1294 | CAGAGAACGUCAGUAUAUU | AAUAUACUGACGUUCUCUG | 1648 |
| 1625 | 1349 | CUUGUCAGUAGAUUGUAUA | UAUACAAUCUACUGACAAG | 1649 |
| 1626 | 1400 | GCUCCUAUUAGAGACUAUU | AAUAGUCUCUAAUAGGAGC | 1650 |

#indicates start position

TABLE 6
Chicken CMAS

| SEQ ID NO: | # | Sense (3′ to 5′) | AntiSense (5′ to 3′) | SEQ ID NO: |
|---|---|---|---|---|
| 1651 | 109 | CACAGUGUGUGGGUAUCUA | UAGAUACCCACACACUGUG | 1675 |
| 1652 | 117 | GUGGGUAUCUACAGACCAU | AUGGUCUGUAGAUACCCAC | 1676 |
| 1653 | 237 | GUUUCUUAACCAUCAUCAU | AUGAUGAUGGUUAAGAAAC | 1677 |
| 1654 | 246 | CCAUCAUCAUGAGGUCGAU | AUCGACCUCAUGAUGAUGG | 1678 |
| 1655 | 322 | GUAGCAAAUCUGAUUCAAA | UUUGAAUCAGAUUUGCUAC | 1679 |
| 1656 | 333 | GAUUCAAAAGGAGGGCUUU | AAAGCCCUCCUUUUGAAUC | 1680 |
| 1657 | 537 | CUACUUGCAGGGUGGUAAA | UUUACCACCCUGCAAGUAG | 1681 |
| 1658 | 548 | GUGGUAAAAUGGCCUACUA | UAGUAGGCCAUUUUACCAC | 1682 |
| 1659 | 585 | CAGUGUGGAUAUUGAUAUA | UAUAUCAAUAUCCACACUG | 1683 |
| 1660 | 589 | GUGGAUAUUGAUAUAGAUA | UAUCUAUAUCAAUAUCCAC | 1684 |
| 1661 | 627 | GCAAAGAGUAUUGAGCUUU | AAAGCUCAAUACUCUUUGC | 1685 |
| 1662 | 632 | GAGUAUUGAGCUUUGGAUA | UAUCCAAAGCUCAAUACUC | 1686 |
| 1663 | 634 | GUAUUGAGCUUUGGAUAUU | AAUAUCCAAAGCUCAAUAC | 1687 |
| 1664 | 681 | GCUAUUGGUUUGCAGUGUU | AACACUGCAAACCAAUAGC | 1688 |
| 1665 | 709 | CUGACAAAUGGUCGCAUUU | AAAUGCGACCAUUUGUCAG | 1689 |
| 1666 | 711 | GACAAAUGGUCGCAUUUAU | AUAAAUGCGACCAUUUGUC | 1690 |
| 1667 | 748 | GAAAUGGUCUCCUACGAUU | AAUCGUAGGAGACCAUUUC | 1691 |
| 1668 | 758 | CCUACGAUUAUAGAGAUAU | AUAUCUCUAUAAUCGUAGG | 1692 |
| 1669 | 759 | CUACGAUUAUAGAGAUAUU | AAUAUCUCUAUAAUCGUAG | 1693 |
| 1670 | 770 | GAGAUAUUGUUGGUAUCAA | UUGAUACCAACAAUAUCUC | 1694 |
| 1671 | 778 | GUUGGUAUCAAUCUAUUAA | UUAAUAGAUUGAUACCAAC | 1695 |
| 1672 | 864 | GCUGGGAUGUAUAGCAGAA | UUCUGCUAUACAUCCCAGC | 1696 |
| 1673 | 877 | GCAGAAGUUAAUGCAACAA | UUGUUGCAUUAACUUCUGC | 1697 |
| 1674 | 941 | GCUGGAAAGAGGUUGCUUA | UAAGCAACCUCUUUCCAGC | 1698 |

#indicates start position

TABLE 7
Chicken GNE

| SEQ ID | | | | SEQ ID |
|---|---|---|---|---|
| NO: | # | Sense (5′ to 3′) | Antisense (5′ to 3′) | NO: |
| 1699 | 309 | GUAACACUUAUCGCAUGAU | AUCAUGCGAUAAGUGUUAC | 1723 |
| 1700 | 446 | CGCCUGAAACCUGACAUAA | UUAUGUCAGGUUUCAGGCG | 1724 |
| 1701 | 564 | GGACCAUUGACGACUCUAU | AUAGAGUCGUCAAUGGUCC | 1725 |
| 1702 | 568 | CAUUGACGACUCUAUUAGA | UCUAAUAGAGUCGUCAAUG | 1726 |
| 1703 | 885 | CACUUGUUCUAUUCCCCAA | UUGGGGAAUAGAACAAGUG | 1727 |
| 1704 | 1026 | CUGGUUGUAUGAUUGGUAA | UUACCAAUCAUACAACCAG | 1728 |
| 1705 | 1251 | GAAUUUUGAAGUUCCUUAA | UUAAGGAACUUCAAAAUUC | 1729 |
| 1706 | 1403 | CGAGUAGCAAUUGUCAGUA | UACUGACAAUUGCUACUCG | 1730 |
| 1707 | 1785 | GAGGUGGAAUCAUUCACCA | UGGUGAAUGAUUCCACCUC | 1731 |
| 1708 | 1917 | CCUCUGGAAUAGCAUUACA | UGUAAUGCUAUUCCAGAGG | 1732 |
| 1709 | 1944 | CUAAGAAACUGCAUGACGA | UCGUCAUGCAGUUUCUUAG | 1733 |
| 1710 | 2233 | GGUGGUCUCAAAUCUAGCA | UGCUAGAUUUGAGACCACC | 1734 |
| 1711 | 2288 | GAUUAUACUACCCGUAGAA | UUCUACGGGUAGUAUAAUC | 1735 |
| 1712 | 2298 | CCCGUAGAAUAUACUAGGU | ACCUAGUAUAUUCUACGGG | 1736 |
| 1713 | 2451 | GCAUUUCCUAAUUGAGGUA | UACCUCAAUUAGGAAAUGC | 1737 |
| 1714 | 2843 | GACUUGGAGGAUACGGUUA | UAACCGUAUCCUCCAAGUC | 1738 |
| 1715 | 3164 | GUACAUAUGAGUAUAAAGA | UCUUUAUACUCAUAUGUAC | 1739 |
| 1716 | 3324 | CACAUUCAAGGUAUUCAUU | AAUGAAUACCUUGAAUGUG | 1740 |
| 1717 | 3345 | CCUUGGAGCAACUAACCUU | AAGGUUAGUUGCUCCAAGG | 1741 |
| 1718 | 3353 | CAACUAACCUUAAAGGCUU | AAGCCUUUAAGGUUAGUUG | 1742 |
| 1719 | 3367 | GGCUUGCCUUGUUAAGACA | UGUCUUAACAAGGCAAGCC | 1743 |
| 1720 | 3372 | GCCUUGUUAAGACAUAGUU | AACUAUGUCUUAACAAGGC | 1744 |
| 1721 | 3693 | CUGGCAUUUAACAACCUAA | UUAGGUUGUUAAAUGCCAG | 1745 |
| 1722 | 3719 | GCCCCAUAGUAAGGAUAUA | UAUAUCCUUACUAUGGGGC | 1746 |

# indicates start position

TABLE 8
Chicken SLC35A1

| SEQ ID | | | | SEQ ID |
|---|---|---|---|---|
| NO: | # | Sense (5′ to 3′) | Antisense (5′ to 3′) | NO: |
| 1747 | 220 | GGCGCAGAGCUCUACUUUU | AAAAGUAGAGCUCUGCGCC | 1771 |
| 1748 | 289 | GGCAUCUUGGCUAGAGAAU | AUUCUCUAGCCAAGAUGCC | 1772 |
| 1749 | 309 | GGGAAGUCUGGCAAGGUUA | UAACCUUGCCAGACUUCCC | 1773 |
| 1750 | 311 | GAAGUCUGGCAAGGUUAAU | AUUAACCUUGCCAGACUUC | 1774 |
| 1751 | 320 | CAAGGUUAAUAACAUCUUU | AAAGAUGUUAUUAACCUUG | 1775 |
| 1752 | 359 | GUCCCAAGGAAUUGCUAAA | UUUAGCAAUUCCUUGGGAC | 1776 |
| 1753 | 373 | CUAAAAUUAAGUGUUCCAU | AUGGAACACUUAAUUUUAG | 1777 |
| 1754 | 399 | GUACGCUGUCCAAAACAAU | AUUGUUUUGGACAGCGUAC | 1778 |
| 1755 | 422 | CUUUUGUGGCUCUUAGCAA | UUGCUAAGAGCCACAAAAG | 1779 |
| 1756 | 452 | CAGUCUACCAGGUGACGUA | UACGUCACCUGGUAGACUG | 1780 |
| 1757 | 460 | CAGGUGACGUACCAGUUAA | UUAACUGGUACGUCACCUG | 1781 |
| 1758 | 494 | CGUUAUGUACAGUCCUCAU | AUGAGGACUGUACAUAACG | 1782 |
| 1759 | 618 | GGAGCAGAAUCCAUGGCUA | UAGCCAUGGAUUCUGCUCC | 1783 |
| 1760 | 624 | GAAUCCAUGGCUAGGGUUU | AAACCCUAGCCAUGGAUUC | 1784 |
| 1761 | 645 | GGCCAUAACUAUUGCUGUA | UACAGCAAUAGUUAUGGCC | 1785 |
| 1762 | 659 | CUGUACUCUGUUCGGGAUU | AAUCCCGAACAGAGUACAG | 1786 |
| 1763 | 770 | CUUUGGUUGGCGUGUACAU | AUGUACACGCCAACCAAAG | 1787 |
| 1764 | 988 | CAGAUAACGGUUACCUUUA | UAAAGGUAACCGUUAUCUG | 1788 |
| 1765 | 1020 | CCUGGUGUGCGUUUCUAUU | AAUAGAAACGCACACCAGG | 1789 |
| 1766 | 1029 | CGUUUCUAUUUACUUCUAU | AUAGAAGUAAAUAGAAACG | 1790 |
| 1767 | 1078 | CAGCCCUCAGAGACUAAAA | UUUUAGUCUCUGAGGGCUG | 1791 |
| 1768 | 1130 | CUUGAAAAUGGACAGGCAA | UUGCCUGUCCAUUUUCAAG | 1792 |
| 1769 | 1200 | GCCUUAAGCUAUUUUCGAA | UUCGAAAAUAGCUUAAGGC | 1793 |
| 1770 | 1231 | GGAUAGAUUAAAAGCGGAA | UUCCGCUUUUAAUCUAUCC | 1794 |

# indicates start position

### Example 5

### Target Genes Associated with Cell Viability

[0445] As discussed herein, a gene associated with host cell viability can be targeted to improve the yield of biomaterial products in cell-based bioprocessing. Example target genes include Bak, Bax, LDH, and FN1.

TABLE 9
Sense and antisense strand sequences of dsRNA against hamster Bak.

| SEQ ID NO: | Sense (3′ to 5′) | AntiSense (5′ to 3′) | SEQ ID NO: |
|---|---|---|---|
| 1795 | ACAGAGGAGGUCUUUCGAA | UUCGAAAGACCUCCUCUGU | 1827 |
| 1796 | GUCUUUCGAAGCUAUGUUU | AAACAUAGCUUCGAAAGAC | 1828 |
| 1797 | UUUCCAUCUCCACCAUCAG | CUGAUGGUGGAGAUGGAAA | 1829 |
| 1798 | AUCUCCACCAUCAGGAACA | UGUUCCUGAUGGUGGAGAU | 1830 |
| 1799 | ACCAUCAGGAACAAGAGAC | GUCUCUUGUUCCUGAUGGU | 1831 |
| 1800 | ACCCCGAGAUGGACAAUUU | AAAUUGUCCAUCUCGGGGU | 1832 |
| 1801 | GAUGGACAAUUUGCUCCUA | UAGGAGCAAAUUGUCCAUC | 1833 |
| 1802 | CAAUUUGCUCCUAGAACCC | GGGUUCUAGGAGCAAAUUG | 1834 |
| 1803 | AGAACCCAACAGCAUCUUG | CAAGAUGCUGUUGGGUUCU | 1835 |
| 1804 | GCAGCUUGCUAUCAUUGGA | UCCAAUGAUAGCAAGCUGC | 1836 |
| 1805 | GCUAUCAUUGGAGAUGACA | UGUCAUCUCCAAUGAUAGC | 1837 |
| 1806 | AUGACAUUAACCGGAGAUA | UAUCUCCGGUUAAUGUCAU | 1838 |
| 1807 | UUAACCGGAGAUACGACAC | GUGUCGUAUCUCCGGUUAA | 1839 |
| 1808 | GAUACGACACAGAGUUCCA | UGGAACUCUGUGUCGUAUC | 1840 |
| 1809 | AGUUCCAGAAUUUACUGGA | UCCAGUAAAUUCUGGAACU | 1841 |
| 1810 | AUUUACUGGAGCAGCUGCA | UGCAGCUGCUCCAGUAAAU | 1842 |
| 1811 | GGAAUGCCUACGAACUCUU | AAGAGUUCGUAGGCAUUCC | 1843 |
| 1812 | ACGAACUCUUCACCAAGAU | AUCUUGGUGAAGAGUUCGU | 1844 |
| 1813 | CUCUUCACCAAGAUUGCCU | AGGCAAUCUUGGUGAAGAG | 1845 |
| 1814 | AGAUUGCCUCCAGCCUAUU | AAUAGGCUGGAGGCAAUCU | 1846 |
| 1815 | GCCUAUUUAAGAGCGGCAU | AUGCCGCUCUUAAAUAGGC | 1847 |
| 1816 | CCUGUAUGUCUACCAACGU | ACGUUGGUAGACAUACAGG | 1848 |
| 1817 | AUGUCUACCAACGUGGUUU | AAACCACGUUGGUAGACAU | 1849 |
| 1818 | UUUUGGCGGAUAUCAUACU | AGUAUGAUAUCCGCCAAAA | 1850 |
| 1819 | GAUAUCAUACUGCACCAUU | AAUGGUGCAGUAUGAUAUC | 1851 |
| 1820 | AUACUGCACCAUUGCAUCG | CGAUGCAAUGGUGCAGUAU | 1852 |
| 1821 | AGACCCAAUCCUGAUUGUG | CACAAUCAGGAUUGGGUCU | 1853 |
| 1822 | CCUGAUUGUGAUGACAAUU | AAUUGUCAUCACAAUCAGG | 1854 |
| 1823 | GAUGACAAUUCUUGGUGUG | CACACCAAGAAUUGUCAUC | 1855 |
| 1824 | UCUUGGUGUGGUUCUGUUG | CAACAGAACCACACCAAGA | 1856 |
| 1825 | CGUGGUACACAGAUUCUUC | GAAGAAUCUGUGUACCACG | 1857 |
| 1826 | UUCUUCAGAUCAUGACUCC | GGAGUCAUGAUCUGAAGAA | 1858 |

TABLE 10
Target gene: Gallus (chicken) BAK1

| SEQ ID | | | | SEQ ID |
|---|---|---|---|---|
| NO: | # | Sense (5′ to 3′) | Antisense (5′ to 3′) | NO: |
| 1859 | 8 | AAUGGAAUGGGAAGUUGGA | UCCAACUUCCCAUUCCAUU | 1880 |
| 1860 | 20 | AGUUGGAGCCUCUGGAUAU | AUAUCCAGAGGCUCCAACU | 1881 |
| 1861 | 40 | GGAAAGGAGAGACCUCGUU | AACGAGGUCUCUCCUUUCC | 1882 |
| 1862 | 41 | GAAAGGAGAGACCUCGUUU | AAACGAGGUCUCUCCUUUC | 1883 |
| 1863 | 146 | CUGCAAUGGAAGGGAACGA | UCGUUCCCUUCCAUUGCAG | 1884 |
| 1864 | 211 | AGGCCAUCACGAGAGAUCA | UGAUCUCUCGUGAUGGCCU | 1885 |
| 1865 | 216 | AUCACGAGAGAUCAAUGCA | UGCAUUGAUCUCUCGUGAU | 1886 |
| 1866 | 268 | UUCCGGAGCUACACCUUCU | AGAAGGUGUAGCUCCGGAA | 1887 |
| 1867 | 269 | UCCGGAGCUACACCUUCUA | UAGAAGGUGUAGCUCCGGA | 1888 |
| 1868 | 278 | ACACCUUCUACCGCUACCA | UGGUAGCGGUAGAAGGUGU | 1889 |
| 1869 | 413 | ACGACAUCAACAAGCGGUA | UACCGCUUGUUGAUGUCGU | 1890 |
| 1870 | 518 | UGUUCGACAGCGGCAUUAA | UUAAUGCCGCUGUCGAACA | 1891 |
| 1871 | 560 | UGGGUUUCGGUUACUGCAU | AUGCAGUAACCGAAACCCA | 1892 |
| 1872 | 565 | UUCGGUUACUGCAUGGCCA | UGGCCAUGCAGUAACCGAA | 1893 |
| 1873 | 716 | ACAAUGUUUACAUGAAGUA | UACUUCAUGUAAACAUUGU | 1894 |
| 1874 | 762 | GGUGGGGCAUUUAGUGGUA | UACCACUAAAUGCCCCACC | 1895 |
| 1875 | 765 | GGGGCAUUUAGUGGUACGA | AGCGUCGUACCACUAAAUG | 1896 |
| 1876 | 770 | AUUUAGUGGUACGACGCUU | AAGCGUCGUACCACUAAAU | 1897 |
| 1877 | 772 | UUAGUGGUACGACGCUUCU | AGAAGCGUCGUACCACUAA | 1898 |
| 1878 | 773 | UAGUGGUACGACGCUUCUU | AAGAAGCGUCGUACCACUA | 1899 |
| 1879 | 1110 | AAUGCAUUGCUGUGAGAGU | ACUCUCACAGCAAUGCAUU | 1900 |

# indicates start position

TABLE 11
dsRNA against hamster Bax.

| SEQ ID NO: | Sense (3′ to 5′) | AntiSense (5′ to 3′) | SEQ ID NO: |
|---|---|---|---|
| 1901 | AGCUCUGAGCAGAUCAUGA | UCAUGAUCUGCUCAGAGCU | 1933 |
| 1902 | GAGCAGAUCAUGAAGACAG | CUGUCUUCAUGAUCUGCUC | 1934 |
| 1903 | UUUGCUACAGGGUUUCAUC | GAUGAAACCCUGUAGCAAA | 1935 |
| 1904 | UGCUACAGGGUUUCAUCCA | UGGAUGAAACCCUGUAGCA | 1936 |
| 1905 | UUUCAUCCAGGAUCGAGCU | AGCUCGAUCCUGGAUGAAA | 1937 |
| 1906 | AUACACCUGAGCUGACCUU | AAGGUCAGCUCAGGUGUAU | 1938 |
| 1907 | AGGAUCCGUCUACCAAGAA | UUCUUGGUAGACGGAUCCU | 1939 |
| 1908 | CCGUCUACCAAGAAGUUGA | UCAACUUCUUGGUAGACGG | 1940 |
| 1909 | UACCAAGAAGUUGAGCGAG | CUCGCUCAACUUCUUGGUA | 1941 |
| 1910 | GAAUUGGAGAUGAGCUGGA | UCCAGCUCAUCUCCAAUUC | 1942 |
| 1911 | AUGAGCUGGACAGCAACAU | AUGUUGCUGUCCAGCUCAU | 1943 |
| 1912 | CUGCAGAGGAUGAUUGCUA | UAGCAAUCAUCCUCUGCAG | 1944 |
| 1913 | UGAUUGCUAAUGUGGAUAC | GUAUCCACAUUAGCAAUCA | 1945 |
| 1914 | AUACUAACUCCCCACGAGA | UCUCGUGGGGAGUUAGUAU | 1946 |
| 1915 | CAGCUGACAUGUUUGCUGA | UCAGCAAACAUGUCAGCUG | 1947 |
| 1916 | UGUUUGCUGAUGGCAACUU | AAGUUGCCAUCAGCAAACA | 1948 |
| 1917 | GUUGUUGCCCUUUUCUACU | AGUAGAAAAGGGCAACAAC | 1949 |
| 1918 | CUUUGCUAGCAAACUGGUG | CACCAGUUUGCUAGCAAAG | 1950 |
| 1919 | AAAGUGCCCGAGCUAAUCA | UGAUUAGCUCGGGCACUUU | 1951 |
| 1920 | CUAAUCAGAACCAUCAUGG | CCAUGAUGGUUCUGAUUAG | 1952 |
| 1921 | UAAUCAGAACCAUCAUGGG | CCCAUGAUGGUUCUGAUUA | 1953 |
| 1922 | UUGUCUGGAUCCAAGACCA | UGGUCUUGGAUCCAGACAA | 1954 |
| 1923 | AUGGCCUCCUCUCAUACUU | AAGUAUGAGAGGAGGCCAU | 1955 |
| 1924 | GACAGUGACUAUCUUUGUG | CACAAAGAUAGUCACUGUC | 1956 |
| 1925 | GUGACUAUCUUUGUGGCUG | CAGCCACAAAGAUAGUCAC | 1957 |
| 1926 | ACUCACGAUCUGGAAGAAC | GUUCUUCCAGAUCGUGAGU | 1958 |
| 1927 | AUCUGGAAGAACAUGGGCU | AGCCCAUGUUCUUCCAGAU | 1959 |
| 1928 | GUCUUGGACUAUUGUCUUU | AAAGACAAUAGUCCAAGAC | 1960 |
| 1929 | UUUGUAAUUAUUGGGAGGG | CCCUCCCAAUAAUUACAAA | 1961 |
| 1930 | GUAAUUAUUGGGAGGGGUG | CACCCCUCCCAAUAAUUAC | 1962 |
| 1931 | AGGGGACAAUAAACCUCAG | CUGAGGUUUAUUGUCCCCU | 1963 |
| 1932 | ACCUCAGGUCCACUUUAAA | UUUAAAGUGGACCUGAGGU | 1964 |

TABLE 12
Sense and antisense strand sequences of dsRNA against hamster LDH-A.

| SEQ ID NO: | Sense (3′ to 5′) | AntiSense (5′ to 3′) | SEQ ID NO: |
|---|---|---|---|
| 1965 | ACUCAAGGACCAGCUGAUU | AAUCAGCUGGUCCUUGAGU | 1997 |
| 1966 | CUACUUAAGGAAGAACAGA | UCUGUUCUUCCUUAAGUAG | 1998 |
| 1967 | GAUUACGAUUGUUGGGGUU | AACCCCAACAAUCGUAAUC | 1999 |
| 1968 | CAGUAUCCUCAUGAAGGAC | GUCCUUCAUGAGGAUACUG | 2000 |
| 1969 | ACUUAGCAGAUGAGCUUGC | GCAAGCUCAUCUGCUAAGU | 2001 |
| 1970 | CCCUUGUUGAUGUCAUGGA | UCCAUGACAUCAACAAGGG | 2002 |
| 1971 | UUUCCUCAGAACACCAAAA | UUUUGGUGUUCUGAGGAAA | 2003 |
| 1972 | AAGACUAUAGUGUGACAGC | GCUGUCACACUAUAGUCUU | 2004 |
| 1973 | CAAGCUGGUCAUUGUCACA | UGUGACAAUGACCAGCUUG | 2005 |
| 1974 | AACGAAACGUGAACAUCUU | AAGAUGUUCACGUUUCGUU | 2006 |
| 1975 | UCAUCAUUCCCAACGUUGU | ACAACGUUGGGAAUGAUGA | 2007 |
| 1976 | GAAAUACAGUCCAGACUGC | GCAGUCUGGACUGUAUUUC | 2008 |
| 1977 | UUCAAACCCAGUGGAUAUC | GAUAUCCACUGGGUUUGAA | 2009 |
| 1978 | UUAUUGGGAGUGGCUGCAA | UUGCAGCCACUCCCAAUAA | 2010 |
| 1979 | CCGUUAUCUGAUGGGAGAA | UUCUCCCAUCAGAUAACGG | 2011 |
| 1980 | UUCACCCACUAAGCUGUCA | UGACAGCUUAGUGGGUGAA | 2012 |
| 1981 | UGUGUGGAGUGGAGUGAAU | AUUCACUCCACUCCACACA | 2013 |
| 1982 | GAGUGGAGUGAAUGUAGCU | AGCUACAUUCACUCCACUC | 2014 |
| 1983 | UCUCCCUGAAGAAUCUGAA | UUCAGAUUCUUCAGGGAGA | 2015 |
| 1984 | ACAAGGAGCAGUGGAAUGA | UCAUUCCACUGCUCCUUGU | 2016 |
| 1985 | AAUGAGGUUCACAAGCAGG | CCUGCUUGUGAACCUCAUU | 2017 |
| 1986 | AGUGCCUAUGAGGUGAUCA | UGAUCACCUCAUAGGCACU | 2018 |
| 1987 | UCAAACUGAAGGGUUAUAC | GUAUAACCCUUCAGUUUGA | 2019 |
| 1988 | CCUGGGCCAUUGGUCUGUC | GACAGACCAAUGGCCCAGG | 2020 |
| 1989 | GAGAGCAUAAUGAAGAAUC | GAUUCUUCAUUAUGCUCUC | 2021 |
| 1990 | UGCAUCCCAUUUCUACCAU | AUGGUAGAAAUGGGAUGCA | 2022 |
| 1991 | AAGGGUCUCUAUGGAAUCA | UGAUUCCAUAGAGACCCUU | 2023 |
| 1992 | CUAUGGAAUCAAGGAUGAU | AUCAUCCUUGAUUCCAUAG | 2024 |
| 1993 | CUGGGACAAAAUGGAAUCU | AGAUUCCAUUUUGUCCCAG | 2025 |
| 1994 | UGUGAAGGUGACUCUAACU | AGUUAGAGUCACCUUCACA | 2026 |
| 1995 | GACUCUAACUUCUGAAGAG | CUCUUCAGAAGUUAGAGUC | 2027 |
| 1996 | CUUGAAGAAGAGUGCAGAU | AUCUGCACUCUUCUUCAAG | 2028 |

TABLE 13
dsRNA against hamster Bax, hamster Bak and hamster LDH-A.

| | | SEQ | | | SEQ | IC₅₀ |
|---|---|---|---|---|---|---|
| Duplex | Target | ID | Sense (3′ to 5′) | AntiSense (5′ to 3′) | ID | (nM) |
| A7 | Bax | 2029 | CCGUCUACCAAGAAGUUGAdT | UCAACUUCUUGGUAGACGGdT | 2044 | 0.38 |
| | | | dT | dT | | |
| B2 | Bax | 2030 | CAGCUGACAUGUUUGCUGAdT | UCAGCAAACAUGUCAGCUGdT | 2045 | 1.46 |
| | | | dT | dT | | |
| B4 | Bax | 2031 | GUUGUUGCCCUUUUCUACUdT | AGUAGAAAAGGGCAACAACdT | 2046 | 0.08 |
| | | | dT | dT | | |
| B11 | Bax | 2032 | GACAGUGACUAUCUUUGUGdT | CACAAAGAUAGUCACUGUCdT | 2047 | 0.22 |
| | | | dT | dT | | |
| C6 | Bax | 2033 | AGCUCUGAGCAGAUCAUGAdT | UCAUGAUCUGCUCAGAGCUdT | 2048 | 0.17 |
| | | | dT | dT | | |
| A2 | Bak | 2034 | GUCUUUCGAAGCUAUGUUUdT | AAACAUAGCUUCGAAAGACdT | 2049 | 0.07 |
| | | | dT | dT | | |
| A10 | Bak | 2035 | GCAGCUUGCUAUCAUUGGAdT | UCCAAUGAUAGCAAGCUGCdT | 2050 | 0.38 |
| | | | dT | dT | | |
| A11 | Bak | 2036 | GCUAUCAUUGGAGAUGACAdT | UGUCAUCUCCAAUGAUAGCdT | 2051 | 0.14 |
| | | | dT | dT | | |
| B9 | Bak | 2037 | GCCUAUUUAAGAGCGGCAUdT | AUGCCGCUCUUAAAUAGGCdT | 2052 | 0.08 |
| | | | dT | dT | | |
| C7 | Bak | 2038 | CGUGGUACACAGAUUCUUCdT | GAAGAAUCUGUGUACCACGdT | 2053 | 0.04 |
| | | | dT | dT | | |
| C10 | LDH | 2039 | CUACUUAAGGAAGAACAGAdT | UCUGUUCUUCCUUAAGUAGdT | 2054 | 0.06 |
| | | | dT | dT | | |
| D5 | LDH | 2040 | CAAGCUGGUCAUUGUCACAdT | UGUGACAAUGACCAGCUUGdT | 2055 | 0.06 |
| | | | dT | dT | | |
| D7 | LDH | 2041 | UCAUCAUUCCCAACGUUGUdT | ACAACGUUGGGAAUGAUGAdT | 2056 | 0.13 |
| | | | dT | dT | | |
| E2 | LDH | 2042 | GAGUGGAGUGAAUGUAGCUdT | AGCUACAUUCACUCCACUCdT | 2057 | 0.40 |
| | | | dT | dT | | |
| E4 | LDH | 2043 | ACAAGGAGCAGUGGAAUGAdT | UCAUUCCACUGCUCCUUGUdT | 2058 | 0.15 |
| | | | dT | dT | | |

TABLE 14
Target gene: Gallus (chicken) FN1

| SEQ ID | | | | SEQ ID |
|---|---|---|---|---|
| NO: | # | Sense (5′ to 3′) | Antisense (5′ to 3′ | NO: |
| 2059 | 173 | GGACGGUACUACCAGAUAA | UUAUCUGGUAGUACCGUCC | 2088 |
| 2060 | 174 | GACGGUACUACCAGAUAAA | UUUAUCUGGUAGUACCGUC | 2089 |
| 2061 | 257 | GGGUUUAACUGCGAAAGCA | UGCUUUCGCAGUUAAACCC | 2090 |
| 2062 | 258 | GGUUUAACUGCGAAAGCAA | UUGCUUUCGCAGUUAAACC | 2091 |
| 2063 | 325 | CCGAGUAGGGGAGACUUAU | AUAAGUCUCCCCUACUCGG | 2092 |
| 2064 | 832 | CCUGCAUACAACUAGCACU | AGUGCUAGUUGUAUGCAGG | 2093 |
| 2065 | 1465 | GUGGGAUAAACAGCACGAU | AUCGUGCUGUUUAUCCCAC | 2094 |
| 2066 | 1467 | GGGAUAAACAGCACGAUAU | AUAUCGUGCUGUUUAUCCC | 2095 |
| 2067 | 1700 | CAGGAUUCCGAAACUCGUA | UACGAGUUUCGGAAUCCUG | 2096 |
| 2068 | 1973 | CACUGGAAGGAAGCUACCA | UGGUAGCUUCCUUCCAGUG | 2097 |
| 2069 | 2256 | CUGGAUUCCGUGUUGAGUA | UACUCAACACGGAAUCCAG | 2098 |
| 2070 | 2765 | GUUUCUGACGUCAAGGUCA | UGACCUUGACGUCAGAAAC | 2099 |
| 2071 | 2921 | GGAACGACCUAUCUCUUUA | UAAAGAGAUAGGUCGUUCC | 2100 |
| 2072 | 3085 | CUCAGGAUACCGACUGACU | AGUCAGUCGGUAUCCUGAG | 2101 |
| 2073 | 3146 | GGCCCUUCUGCUACUAAGU | ACUUAGUAGCAGAAGGGCC | 2102 |
| 2074 | 3252 | GAGUCUUCACAACGUAUCA | UGAUACGUUGUGAAGACUC | 2103 |
| 2075 | 3827 | GACCUAAGCUUUGUUGACA | UGUCAACAAAGCUUAGGUC | 2104 |
| 2076 | 3868 | GAGGUGGACCCCGUUAAAU | AUUUAACGGGGUCCACCUC | 2105 |
| 2077 | 4291 | GGUGAGAGUCUACAGUGUU | AACACUGUAGACUCUCACC | 2106 |
| 2078 | 4373 | GGCCUUGACUUCUCGGAUA | UAUCCGAGAAGUCAAGGCC | 2107 |
| 2079 | 4434 | CCACCAUUACGGGCUAUAA | UUAUAGCCCGUAAUGGUGG | 2108 |
| 2080 | 4443 | CGGGCUAUAAGAUUCGGCA | UGCCGAAUCUUAUAGCCCG | 2109 |
| 2081 | 4444 | GGGCUAUAAGAUUCGGCAU | AUGCCGAAUCUUAUAGCCC | 2110 |
| 2082 | 4923 | CCCAGAUGCAAGUUACCGA | UCGGUAACUUGCAUCUGGG | 2111 |
| 2083 | 5874 | GCCCCGAUGUUAGGACUUA | UAAGUCCUAACAUCGGGGC | 2112 |
| 2084 | 5882 | GUUAGGACUUACACUAUCA | UGAUAGUGUAAGUCCUAAC | 2113 |
| 2085 | 6179 | GAACCAGGGACCGAAUACA | UGUAUUCGGUCCCUGGUUC | 2114 |
| 2086 | 7158 | CUCAUGAGACCACAUGCUA | UAGCAUGUGGUCUCAUGAG | 2115 |
| 2087 | 7647 | GACUUUUCUCACGAUUGGU | ACCAAUCGUGAGAAAAGUC | 2116 |

# indicates start position

TABLE 15
Target gene: Gallus (chicken) PTEN

| SEQ ID | | | | SEQ ID |
|---|---|---|---|---|
| NO: | # | Sense (5′-3′) | Antisense (5′-3′) | NO: |
| 2117 | 300 | UAUUCAGUAGUACGGAUUU | AAAUCCGUACUACUGAAUA | 2147 |
| 2118 | 310 | UACGGAUUUCUAUUAAGUU | AACUUAAUAGAAAUCCGUA | 2148 |
| 2119 | 672 | AGGAGUAUACCGGAACAAU | AUUGUUCCGGUAUACUCCU | 2149 |
| 2120 | 867 | UGACCAAUGGCUAAGUGAA | UUCACUUAGCCAUUGGUCA | 2150 |
| 2121 | 938 | GUGUAAUGAUAUGUGCAUA | UAUGCACAUAUCAUUACAC | 2151 |
| 2122 | 960 | GUUGCAUCGAGGCAAGUUU | AAACUUGCCUCGAUGCAAC | 2152 |
| 2123 | 986 | CUCAAGAAGCCCUAGAUUU | AAAUCUAGGGCUUCUUGAG | 2153 |
| 2124 | 1058 | GACGCUACGUGUACUACUA | UAGUAGUACACGUAGCGUC | 2154 |
| 2125 | 2084 | AUGUGUAUACGUAGGAAUU | AAUUCCUACGUAUACACAU | 2155 |
| 2126 | 2085 | UGUGUAUACGUAGGAAUUU | AAAUUCCUACGUAUACACA | 2156 |
| 2127 | 2323 | GUACCAUAUCCGGCUAUUU | AAAUAGCCGGAUAUGGUAC | 2157 |
| 2128 | 2324 | UACCAUAUCCGGCUAUUUA | UAAAUAGCCGGAUAUGGUA | 2158 |
| 2129 | 2356 | UUAGCAUGCUGCCGUAAUU | AAUUACGGCAGCAUGCUAA | 2159 |
| 2130 | 2642 | AUAAAAGUUGUCGGUGAUU | AAUCACCGACAACUUUUAU | 2160 |
| 2131 | 2748 | ACGCCAGGCAACAUCUUAA | UUAAGAUGUUGCCUGGCGU | 2161 |
| 2132 | 2752 | CAGGCAACAUCUUAACAUU | AAUGUUAAGAUGUUGCCUG | 2162 |
| 2133 | 2770 | UUCUUAUUAGGUCUUCAAU | AUUGAAGACCUAAUAAGAA | 2163 |
| 2134 | 2972 | GACCUUACACGUUGUAUUA | UAAUACAACGUGUAAGGUC | 2164 |
| 2135 | 3427 | AAAUUUACACUUGCUCGAU | AUCGAGCAAGUGUAAAUUU | 2165 |
| 2136 | 3558 | AGCAUUAAUGGUAAGGAUU | AAUCCUUACCAUUAAUGCU | 2166 |
| 2137 | 3631 | UUUGGGAUCCGUUGGUCAA | UUGACCAACGGAUCCCAAA | 2167 |
| 2138 | 3658 | AUCACAUUCACGAUUCUAA | UUAGAAUCGUGAAUGUGAU | 2168 |
| 2139 | 3664 | UUCACGAUUCUAACUUCUA | UAGAAGUUAGAAUCGUGAA | 2169 |
| 2140 | 3665 | UCACGAUUCUAACUUCUAA | UUAGAAGUUAGAAUCGUGA | 2170 |
| 2141 | 3812 | GACGUUAACUCUUACCCUU | AAGGGUAAGAGUUAACGUC | 2171 |
| 2142 | 4089 | UUUUGAAUGUUUCGAUGUU | AACAUCGAAACAUUCAAAA | 2172 |
| 2143 | 4315 | UAAUUAGCUUGAAACGCAU | AUGCGUUUCAAGCUAAUUA | 2173 |
| 2144 | 4469 | AUUGGUAGCCCCACUCAAA | UUUGAGUGGGGCUACCAAU | 2174 |
| 2145 | 4570 | GCAUCAGAUGUUUCGGCUU | AAGCCGAAACAUCUGAUGC | 2175 |
| 2146 | 5042 | CCCUUUAUCUCUUAGUGUU | AACACUAAGAGAUAAAGGG | 2176 |

# indicates start position

TABLE 16
Target gene: Gallus (chicken) LDHA

| SEQ ID | | | | SEQ ID |
|---|---|---|---|---|
| NO: | # | Sense (5′-3′) | Antisense (5′-3′) | NO: |
| 2177 | 281 | GGCAGAUGAACUUACCCUU | AAGGGUAAGUUCAUCUGCC | 2203 |
| 2178 | 283 | CAGAUGAACUUACCCUUGU | ACAAGGGUAAGUUCAUCUG | 2204 |
| 2179 | 456 | GGAGAAAGCCGUCUUAACU | AGUUAAGACGGCUUUCUCC | 2205 |
| 2180 | 457 | GAGAAAGCCGUCUUAACUU | AAGUUAAGACGGCUUUCUC | 2206 |
| 2181 | 464 | CCGUCUUAACUUGGUCCAA | UUGGACCAAGUUAAGACGG | 2207 |
| 2182 | 522 | GUGAAAUACAGUCCUGACU | AGUCAGGACUGUAUUUCAC | 2208 |
| 2183 | 542 | CAAGCUGCUGAUUGUCUCA | UGAGACAAUCAGCAGCUUG | 2209 |
| 2184 | 548 | GCUGAUUGUCUCAAACCCA | UGGGUUUGAGACAAUCAGC | 2210 |
| 2185 | 983 | GGGCAUGCACGGAAUAAAA | UUUUAUUCCGUGCAUGCCC | 2211 |
| 2186 | 1056 | GUAGUGAAGAUGAUCCUAA | UUAGGAUCAUCUUCACUAC | 2212 |
| 2187 | 1061 | GAAGAUGAUCCUAAAACCU | AGGUUUUAGGAUCAUCUUC | 2213 |
| 2188 | 1194 | CUUAAUGUUGCACUUUCCA | UGGAAAGUGCAACAUUAAG | 2214 |
| 2189 | 1230 | GGUGUAUGUAUCUCAACUA | UAGUUGAGAUACAUACACC | 2215 |
| 2190 | 1358 | CCACCUAGUAUUGUACAGU | ACUGUACAAUACUAGGUGG | 2216 |
| 2191 | 1380 | GUGGUGUGACAUCAAUCCA | UGGAUUGAUGUCACACCAC | 2217 |
| 2192 | 1389 | CAUCAAUCCAGCAUUGAAA | UUUCAAUGCUGGAUUGAUG | 2218 |
| 2193 | 1432 | GUUUAAACAUUAGCCCAGA | UCUGGGCUAAUGUUUAAAC | 2219 |
| 2194 | 1508 | CACAGGAUUGUCAAACUAU | AUAGUUUGACAAUCCUGUG | 2220 |
| 2195 | 1519 | CAAACUAUUUGACAAACCU | AGGUUUGUCAAAUAGUUUG | 2221 |
| 2196 | 1541 | CUGCCAGCUGAAUAGCUUA | UAAGCUAUUCAGCUGGCAG | 2222 |
| 2197 | 1569 | CUGUUGGUAGGUCCAAAUA | UAUUUGGACCUACCAACAG | 2223 |
| 2198 | 1599 | CUUCUUUGGAACUUGUGUA | UACACAAGUUCCAAAGAAG | 2224 |
| 2199 | 1606 | GGAACUUGUGUAUACCUUU | AAAGGUAUACACAAGUUCC | 2225 |
| 2200 | 1607 | GAACUUGUGUAUACCUUUU | AAAAGGUAUACACAAGUUC | 2226 |
| 2201 | 1649 | GUACUGUAUCAGACUAGUU | AACUAGUCUGAUACAGUAC | 2227 |
| 2202 | 1708 | GUUUAUAUAUGCAACAAGA | UCUUGUUGCAUAUAUAAAC | 2228 |

# indicates start position

### Example 6

### Targets Associated with Glycosylation

[0446] In addition to the target genes associated with sialic acid, as described herein, yield and/or qualities of a biological product can be optimized by targeting genes associated with glycosylation in the host cell.

TABLE 17
dsRNA against hamster fucosyltransferase (FUT8).

| SEQ ID NO: | Sense (3′ to 5′) | AntiSense (5′ to 3′) | SEQ ID NO: |
|---|---|---|---|
| 2229 | ACUCUGAAAAUGCGGGCAU | AUGCCCGCAUUUUCAGAGU | 2249 |
| 2230 | GGUUCCUGGCGUUGGAUUA | UAAUCCAACGCCAGGAACC | 2250 |
| 2231 | GGAUUAUGCUCAUUCUUUU | AAAAGAAUGAGCAUAAUCC | 2251 |
| 2232 | UUUAUAUAGGUGGUCAUUU | AAAUGACCACCUAUAUAAA | 2252 |
| 2233 | UAUAGGUGGUCAUUUGGUU | AACCAAAUGACCACCUAUA | 2253 |
| 2234 | GGUCAUUUGGUUCGAGAUA | UAUCUCGAACCAAAUGACC | 2254 |
| 2235 | GUCAUUUGGUUCGAGAUAA | UUAUCUCGAACCAAAUGAC | 2255 |
| 2236 | CUCUCCAAGAUUCUUGCAA | UUGCAAGAAUCUUGGAGAG | 2256 |
| 2237 | CAGGAAGAGUCCGUGUUUU | AAAACACGGACUCUUCCUG | 2257 |
| 2238 | GAGCUAAAGAGCUCUGGUU | AACCAGAGCUCUUUAGCUC | 2258 |
| 2239 | AAGGUCUAUCAUGACAGAU | AUCUGUCAUGAUAGACCUU | 2259 |
| 2240 | CUGGUCCAGCGGAGAAUAA | UUAUUCUCCGCUGGACCAG | 2260 |
| 2241 | GCACCCAGCGAACACUCAU | AUGAGUGUUCGCUGGGUGC | 2261 |
| 2242 | ACUGUGUUUAGACCUGUAA | UUACAGGUCUAAACACAGU | 2262 |
| 2243 | UGGCUUCAAACAUCCAGUU | AACUGGAUGUUUGAAGCCA | 2263 |
| 2244 | CAAAGACAAAGUACUCCAA | UUGGAGUACUUUGUCUUUG | 2264 |
| 2245 | AAGACAAAGUACUCCAAUU | AAUUGGAGUACUUUGUCUU | 2265 |
| 2246 | AGACAAAGUACUCCAAUUA | UAAUUGGAGUACUUUGUCU | 2266 |
| 2247 | GACAAAGUACUCCAAUUAU | AUAAUUGGAGUACUUUGUC | 2267 |
| 2248 | UGAUCCUGGAUAUACACUU | AAGUGUAUAUCCAGGAUCA | 2268 |

TABLE 18
dsRNA against hamster GDP-mannose 4,6-dehydratase (GMDS).

| SEQ ID NO: | Sense (3′ to 5′) | AntiSense (5′ to 3′) | SEQ ID NO: |
|---|---|---|---|
| 2269 | UCAUUUAAUACAGGUCGAA | UUCGACCUGUAUUAAAUGA | 2289 |
| 2270 | AUUUAAUACAGGUCGAAUU | AAUUCGACCUGUAUUAAAU | 2290 |
| 2271 | UACAGGUCGAAUUGAACAU | AUGUUCAAUUCGACCUGUA | 2291 |
| 2272 | GUCGAAUUGAACAUUUAUA | UAUAAAUGUUCAAUUCGAC | 2292 |
| 2273 | AUAUUGAAGGAAACAUGAA | UUCAUGUUUCCUUCAAUAU | 2293 |
| 2274 | GGAAACAUGAAGUUGCACU | AGUGCAACUUCAUGUUUCC | 2294 |
| 2275 | AGCUAAGAUUUACCUUGGA | UCCAAGGUAAAUCUUAGCU | 2295 |
| 2276 | CUAAGAUUUACCUUGGACA | UGUCCAAGGUAAAUCUUAG | 2296 |
| 2277 | UAAGAUUUACCUUGGACAA | UUGUCCAAGGUAAAUCUUA | 2297 |
| 2278 | GAGACUGGGGCCAUGCCAA | UUGGCAUGGCCCCAGUCUC | 2298 |
| 2279 | GGGCCAUGCCAAGGACUAU | AUAGUCCUUGGCAUGGCCC | 2299 |
| 2280 | UGUCAUAGCUACUGGGGAA | UUCCCCAGUAGCUAUGACA | 2300 |
| 2281 | ACCAUUGUGUGGGAAGGAA | UUCCUUCCCACACAAUGGU | 2301 |
| 2282 | GUGGGCAGAUGUAAAGAGA | UCUCUUUACAUCUGCCCAC | 2302 |
| 2283 | GAUGUAAAGAGACCGGCAA | UUGCCGGUCUCUUUACAUC | 2303 |
| 2284 | GAAGCCCCGCGUUGCCUUU | AAAGGCAACGCGGGGCUUC | 2304 |
| 2285 | UCACAUACUCAUUUUACUU | AAGUAAAAUGAGUAUGUGA | 2305 |
| 2286 | ACUUGAAAUUAUGUCACUA | UAGUGACAUAAUUUCAAGU | 2306 |
| 2287 | AAAUUAUGUCACUAGACAA | UUGUCUAGUGACAUAAUUU | 2307 |
| 2288 | GAGUCUUGAGAUUGUUUUU | AAAAACAAUCUCAAGACUC | 2308 |

### Example 7

### Gene Targets Associated with a Host Cell Immune Response

TABLE 19
Target gene: Gallus (chicken) IFNAR1

| SEQ ID | | | | SEQ ID |
|---|---|---|---|---|
| NO: | # | Sense (5′-3′) | Antisense (5′-3′) | NO: |
| 2309 | 205 | AAUACAAAUUUCACCCUAA | UUAGGGUGAAAUUUGUAUU | 2338 |
| 2310 | 430 | UCUCCAUGGUCUAGCAUUU | AAAUGCUAGACCAUGGAGA | 2339 |
| 2311 | 540 | UCCAGAAGCAAAUCAGGUU | AACCUGAUUUGCUUCUGGA | 2340 |
| 2312 | 673 | GCUCCAGAGACUACCUAUU | AACUUUCAAACAAUAGGUA | 2341 |
| 2313 | 684 | UACCUAUUGUUUGAAAGUU | AACUUUCAAACAAUAGGUA | 2342 |
| 2314 | 839 | UUUGGGAUAAUCACUAUAA | UUAUAGUGAUUAUCCCAAA | 2343 |
| 2315 | 843 | GGAUAAUCACUAUAACGAA | UUCGUUAUAGUGAUUAUCC | 2344 |
| 2316 | 866 | UGACCUAUACCGUACAGUA | UACUGUACGGUAUAGGUCA | 2345 |
| 2317 | 1059 | GUCUAAAGACGUAGAAGUA | UACUUCUACGUCUUUAGAC | 2346 |
| 2318 | 1071 | AGAAGUAGAUCCUCCGGUA | UACCGGAGGAUCUACUUCU | 2347 |
| 2319 | 1072 | GAAGUAGAUCCUCCGGUAA | UUACCGGAGGAUCUACUUC | 2348 |
| 2320 | 1181 | AAAUCAUGAGUGACCUUUA | UAAAGGUCACUCAUGAUUU | 2349 |
| 2321 | 1187 | UGAGUGACCUUUAUGAUUU | AAAUCAUAAAGGUCACUCA | 2350 |
| 2322 | 1407 | ACACUUACCUCUGAUCAUU | AAUGAUCAGAGGUAAGUGU | 2351 |
| 2323 | 1487 | UCCUGUAUCAAGUCUAUAA | UUAUAGACUUGAUACAGGA | 2352 |
| 2324 | 1600 | GUAGAAGAACCGGUAGAAA | UUUCUACCGGUUCUUCUAC | 2353 |
| 2325 | 1610 | CGGUAGAAAUUUGUUACAU | AUGUAACAAAUUUCUACCG | 2354 |
| 2326 | 1625 | ACAUAAUUGAGAGUAGGAU | AUCCUACUCUCAAUUAUGU | 2355 |
| 2327 | 1689 | UAAACAGAGCAGUCGAGAU | AUCUCGACUGCUCUGUUUA | 2356 |
| 2328 | 1701 | UCGAGAUUCAGGGAAUUAU | AUAAUUCCCUGAAUCUCGA | 2357 |
| 2329 | 1725 | CGACGAUAAUACCUCACAA | UUGUGAGGUAUUAUCGUCG | 2358 |
| 2330 | 1765 | CUAGGAAAUGACAUACUAU | AUAGUAUGUCAUUUCCUAG | 2359 |
| 2331 | 1766 | UAGGAAAUGACAUACUAUA | UAUAGUAUGUCAUUUCCUA | 2360 |
| 2332 | 1809 | UAUGGGACUUGUAGUAUAA | UUAUACUACAAGUCCCAUA | 2361 |
| 2333 | 1887 | UUGGGAUCCUCGUUCUGAA | UUCAGAACGAGGAUCCCAA | 2362 |
| 2334 | 1998 | ACACCAUUCUGACUGAAUA | UAUUCAGUCAGAAUGGUGU | 2363 |
| 2335 | 2054 | AGAAGAGAUCCGUAUGCUU | AAGCAUACGGAUCUCUUCU | 2364 |
| 2336 | 2078 | ACUUGAACCUGAUAACCUU | AAGGUUAUCAGGUUCAAGU | 2365 |
| 2337 | 2170 | GACAGAGUCCUUAGAUUAU | AUAAUCUAAGGACUCUGUC | 2366 |

# indicates start position

TABLE 20
Target gene: Gallus (chicken) CDKN2A

| SEQ ID | | | | SEQ ID |
|---|---|---|---|---|
| NO: | # | Sense (5′-3′) | Antisense (5′-3′) | NO: |
| 2367 | 868 | GUGUUGAUCUCAGUCCGAU | AUCGGACUGAGAUCAACAC | 2401 |
| 2368 | 895 | UAUUCUUAACCGGGCUGAU | AUCAGCCCGGUUAAGAAUA | 2402 |
| 2369 | 905 | CGGGCUGAUUGUAUUCGUU | AACGAAUACAAUCAGCCCG | 2403 |
| 2370 | 906 | GGGCUGAUUGUAUUCGUUA | UAACGAAUACAAUCAGCCC | 2404 |
| 2371 | 907 | GGCUGAUUGUAUUCGUUAU | AUAACGAAUACAAUCAGCC | 2405 |
| 2372 | 968 | AUGCUUUCAUAUAGCCGUU | AACGGCUAUAUGAAAGCAU | 2406 |
| 2373 | 972 | UUUCAUAUAGCCGUUAGAA | UUCUAACGGCUAUAUGAAA | 2407 |
| 2374 | 973 | UUCAUAUAGCCGUUAGAAA | UUUCUAACGGCUAUAUGAA | 2408 |
| 2375 | 986 | UAGAAAGAGAAACGGGCAU | AUGCCCGUUUCUCUUUCUA | 2409 |
| 2376 | 1060 | CAGAAAAUCUUACGAAGUU | AACUUCGUAAGAUUUUCUG | 2410 |
| 2377 | 1092 | AAUUAGGUUCUAGGAGCUA | UAGCUCCUAGAACCUAAUU | 2411 |
| 2378 | 1161 | UAGUCAGUUGAAGCGGUUU | AAACCGCUUCAACUGACUA | 2412 |
| 2379 | 1165 | CAGUUGAAGCGGUUUUGUU | AACAAAACCGCUUCAACUG | 2413 |
| 2380 | 1173 | GCGGUUUUGUUACUGCGAA | UUCGCAGUAACAAAACCGC | 2414 |
| 2381 | 1177 | UUUUGUUACUGCGAAGUUU | AAACUUCGCAGUAACAAAA | 2415 |
| 2382 | 1178 | UUUGUUACUGCGAAGUUUU | AAAACUUCGCAGUAACAAA | 2416 |
| 2383 | 1215 | AUCCAAAAGCUCUGUGUAA | UUACACAGAGCUUUUGGAU | 2417 |
| 2384 | 1216 | UCCAAAAGCUCUGUGUAAU | AUUACACAGAGCUUUUGGA | 2418 |
| 2385 | 1224 | CUCUGUGUAAUGAGUGUUU | AAACACUCAUUACACAGAG | 2419 |
| 2386 | 1313 | UGACCUUGGUCCACUGUAA | UUACAGUGGACCAAGGUCA | 2420 |
| 2387 | 1314 | GACCUUGGUCCACUGUAAA | UUUACAGUGGACCAAGGUC | 2421 |
| 2388 | 1413 | GAGGCAUCCGAUUCAACAA | UUGUUGAAUCGGAUGCCUC | 2422 |
| 2389 | 1419 | UCCGAUUCAACAACGAAAU | AUUUCGUUGUUGAAUCGGA | 2423 |
| 2390 | 1422 | GAUUCAACAACGAAAUGUA | UACAUUUCGUUGUUGAAUC | 2424 |
| 2391 | 1440 | AAAAUUGGACUGUUACGUU | AACGUAACAGUCCAAUUUU | 2425 |
| 2392 | 1452 | UUACGUUCCACUUAAAGUU | AACUUUAAGUGGAACGUAA | 2426 |
| 2393 | 1472 | AAGUGUAAAGGGAUCCGUU | AACGGAUCCCUUUACACUU | 2427 |
| 2394 | 1473 | AGUGUAAAGGGAUCCGUUA | UAACGGAUCCCUUUACACU | 2428 |
| 2395 | 1474 | GUGUAAAGGGAUCCGUUAU | AUAACGGAUCCCUUUACAC | 2429 |
| 2396 | 1483 | GAUCCGUUAUGCUCUUUUA | UAAAAGAGCAUAACGGAUC | 2430 |
| 2397 | 1484 | AUCCGUUAUGCUCUUUUAU | AUAAAAGAGCAUAACGGAU | 2431 |
| 2398 | 1485 | UCCGUUAUGCUCUUUUAUU | AAUAAAAGAGCAUAACGGA | 2432 |
| 2399 | 1486 | CCGUUAUGCUCUUUUAUUA | UAAUAAAAGAGCAUAACGG | 2433 |
| 2400 | 1487 | CGUUAUGCUCUUUUAUUAA | UUAAUAAAAGAGCAUAACG | 2434 |

# indicates start position

### Example 8

### Eliminating Latent or Adventitious Viruses from Bioprocessing Cell Culture

[0448] RNAi provides a mechanism to block cell culture infections by treating cells while in the bioreactor with siRNAs directed against the infecting latent or adventitious virus. In this manner, RNAi can be used to “cure” the cell bank-line or production cell-line by eliminating or substantially eliminating certain viral types from the contaminated cells.

[0449] For example, ROTARIX® (rotavirus vaccine, live, oral) is a liquid suspension of the live attenuated human rotavirus RIX4414 strain grow in bioprocessing-scale cultures of Vero cells. In March, 2010, preparations of ROTARIX® vaccine were found to be contaminated with PCV1 DNA. PVC1 is a single-stranded, ambisense, circular DNA of about 1800 to 2000 bp (see Examples 1 and 2 herein). Two mRNAs for the Rep and Cap proteins are encoded by the encapsidated viral DNA and the complementary DNA of the replicative intermediate DNA strand.

[0450] In establishing reagents and uptake conditions to remove PCV1 from cell cultures, Vero from frozen stocks are grown in liquid media. Uptake conditions are established with NDLs using FITC-labeled siRNA. Viability, efficiency, and cell growth are evaluated. The appropriate lipid formulation for RNAi delivery is identified. siRNAs for Vero cell targets and PCV1 are identified (+/− label (Cy3 or Alexa)). Example 1, herein, provides example targets of the PCV1 rep gene. Table 21, herein provides example targets of the PCV1 cap gene. Potent sets are identified, and the best dosing conditions in Vero cells grown in a bioprocessor are established. NDL/siRNA is optimized to maximize cellular uptake and minimize NDL/siRNA in cell culture media. MS analysis of media and cell extracts is compared, including NDL and siRNA analysis. Multiple siRNAs can be used, for example directed against pS-RepA, pS-RepB, and pS-RepC.

[0451] Vero cells are then treated prophalactically with “best” PCV1 siRNA(s) at different PCV1 multiplicities of infection (MOI). In test systems, siRNAs are added, then followed by PCV1 infection. Alternatively, Vero cells are infected with PCV1 at a low MOI, then PCV1 siRNA(s) are added. Infected Vero cells can also be passaged at minimal cell densities, and dosed with PCV1 siRNA with each passage. Viral titers may be increased to monitor efficacy of the system, which may be established in a high throughput, e.g., 96-well-plate at single cell densities, format. Additionally, Bax/Bak siRNAs can be included to increase cell density. Cells are sampled at different time points for qPCR, PERT (or other assay) analysis for viral DNA, with the goal of demonstrating that the PCV1 siRNA-treated Vero cells do not support viral replication.

[0452] Not to be bound by theory, because PCV1 does not integrate into host genome, blocking viral replication of PCV1 allows the virus to be eliminated from growing Vero cells. In other words, PCV1 replication can be blocked using siRNAs directed against PCV1 while sorting for Vero cells that do not contain PCV1. A PCV1 DNA-based sorting assay is then used that allows Vero cell-sorting to identify and expand those cells that do not contain virus. The sorting assays can be PCR-based, FRET-based, and/or include FACS sorting. Blocking viral replication while sorting for PCV1-free cells, then expanding these non-infected cells, allows for validation of virus removal from the cell bank.

[0453] Rotavirus-producing Vero cells can then treated prophalactically with the “best” PCV1 siRNA(s), using best dose concentration and frequency, for maintenance of the cell bank. The bioprocessing of the vaccine is carried out as usual, and tested for PCV1 DNA or viral proteins as discussed herein or otherwise known in the art. Thus, PCV1 siRNA treatment of ROTARIX® vaccine-producing Vero cell line can block PCV1 replication and eliminate any detectable virus from vaccine product.

TABLE 21
Target gene: PCV1 cap

| SEQ ID | | | | SEQ ID |
|---|---|---|---|---|
| NO: | # | Sense (5′ to 3′) | Antisense (5′ to 3′) | NO: |
| 1345 | 48 | GAGGGUCUUUUAGGAUAAA | UUUAUCCUAAAAGACCCUC | 1393 |
| 1346 | 50 | GGGUCUUUUAGGAUAAAUU | AAUUUAUCCUAAAAGACCC | 1394 |
| 1347 | 69 | CUCUGAAUUGUACAUAAAU | AUUUAUGUACAAUUCAGAG | 1395 |
| 1348 | 91 | CAGCCUUACCACAUAAUUU | AAAUUAUGUGGUAAGGCUG | 1396 |
| 1349 | 120 | CUGCAUUUUGGAGCGCAUA | UAUGCGCUCCAAAAUGCAG | 1397 |
| 1350 | 156 | CGACAUUGGUGUGGGUAUU | AAUACCCACACCAAUGUCG | 1398 |
| 1351 | 157 | GACAUUGGUGUGGGUAUUU | AAAUACCCACACCAAUGUC | 1399 |
| 1352 | 159 | CAUUGGUGUGGGUAUUUAA | UUAAAUACCCACACCAAUG | 1400 |
| 1353 | 181 | GAGCCACAGCUGGUUUCUU | AAGAAACCAGCUGUGGCUC | 1401 |
| 1354 | 183 | GCCACAGCUGGUUUCUUUU | AAAAGAAACCAGCUGUGGC | 1402 |
| 1355 | 184 | CCACAGCUGGUUUCUUUUA | UAAAAGAAACCAGCUGUGG | 1403 |
| 1356 | 187 | CAGCUGGUUUCUUUUAUUA | UAAUAAAAGAAACCAGCUG | 1404 |
| 1357 | 189 | GCUGGUUUCUUUUAUUAUU | AAUAAUAAAAGAAACCAGC | 1405 |
| 1358 | 211 | GUGGAACCAAUCAAUUGUU | AACAAUUGAUUGGUUCCAC | 1406 |
| 1359 | 227 | GUUUGGUCCAGCUCAGGUU | AACCUGAGCUGGACCAAAC | 1407 |
| 1360 | 256 | GUACCUGGAGUGGUAGGUA | UACCUACCACUCCAGGUAC | 1408 |
| 1361 | 294 | GGCGGGAGGAGUAGUUAAU | AUUAACUACUCCUCCCGCC | 1409 |
| 1362 | 295 | GCGGGAGGAGUAGUUAAUA | UAUUAACUACUCCUCCCGC | 1410 |
| 1363 | 296 | CGGGAGGAGUAGUUAAUAU | AUAUUAACUACUCCUCCCG | 1411 |
| 1364 | 297 | GGGAGGAGUAGUUAAUAUA | UAUAUUAACUACUCCUCCC | 1412 |
| 1365 | 341 | GGGGUUACAAAGUUGGCAU | AUGCCAACUUUGUAACCCC | 1413 |
| 1366 | 348 | CAAAGUUGGCAUCCAAGAU | AUCUUGGAUGCCAACUUUG | 1414 |
| 1367 | 377 | GACCCAACACCUCUUUGAU | AUCAAAGAGGUGUUGGGUC | 1415 |
| 1368 | 387 | CUCUUUGAUUAGAGGUGAU | AUCACCUCUAAUCAAAGAG | 1416 |
| 1369 | 426 | CAUAUUUAGCCUUUCUAAU | AUUAGAAAGGCUAAAUAUG | 1417 |
| 1370 | 436 | CUUUCUAAUACGGUAGUAU | AUACUACCGUAUUAGAAAG | 1418 |
| 1371 | 446 | CGGUAGUAUUGGAAAGGUA | UACCUUUCCAAUACUACCG | 1419 |
| 1372 | 498 | GGAACUGGCCGAUGUUGAA | UUCAACAUCGGCCAGUUCC | 1420 |
| 1373 | 499 | GAACUGGCCGAUGUUGAAU | AUUCAACAUCGGCCAGUUC | 1421 |
| 1374 | 511 | GUUGAAUUUGAGGUGGUUA | UAACCACCUCAAAUUCAAC | 1422 |
| 1375 | 520 | GAGGUGGUUAACAUUCCAA | UUGGAAUGUUAACCACCUC | 1423 |
| 1376 | 523 | GUGGUUAACAUUCCAAGAU | AUCUUGGAAUGUUAACCAC | 1424 |
| 1377 | 535 | CCAAGAUGGCUGCGAGUAU | AUACUCGCAGCCAUCUUGG | 1425 |
| 1378 | 543 | GCUGCGAGUAUCCUCCUUU | AAAGGAGGAUACUCGCAGC | 1426 |
| 1379 | 544 | CUGCGAGUAUCCUCCUUUU | AAAAGGAGGAUACUCGCAG | 1427 |
| 1380 | 546 | GCGAGUAUCCUCCUUUUAU | AUAAAAGGAGGAUACUCGC | 1428 |
| 1381 | 554 | CCUCCUUUUAUGGUGAGUA | UACUCACCAUAAAAGGAGG | 1429 |
| 1382 | 557 | CCUUUUAUGGUGAGUACAA | UUGUACUCACCAUAAAAGG | 1430 |
| 1383 | 558 | CUUUUAUGGUGAGUACAAA | UUUGUACUCACCAUAAAAG | 1431 |
| 1384 | 565 | GGUGAGUACAAAUUCUCUA | UAGAGAAUUUGUACUCACC | 1432 |
| 1385 | 579 | CUCUAGAAAGGCGGGAAUU | AAUUCCCGCCUUUCUAGAG | 1433 |
| 1386 | 610 | CUUUCGGCGCCAUCUGUAA | UUACAGAUGGCGCCGAAAG | 1434 |
| 1387 | 616 | GCGCCAUCUGUAACGGUUU | AAACCGUUACAGAUGGCGC | 1435 |
| 1388 | 665 | CUCCGGAGGAUGUUUCCAA | UUGGAAACAUCCUCCGGAG | 1436 |
| 1389 | 668 | CGGAGGAUGUUUCCAAGAU | AUCUUGGAAACAUCCUCCG | 1437 |
| 1390 | 700 | GGUCCUUCUUCUGCGGUAA | UUACCGCAGAAGAAGGACC | 1438 |
| 1391 | 729 | GCCACGUCAUCCUAUAAAA | UUUUAUAGGAUGACGUGGC | 1439 |
| 1392 | 754 | GAAGUGCGCUGCUGUAGUA | UACUACAGCAGCGCACUUC | 1440 |

# indicates start position

1. A method of isolating a cell that is substantially devoid of a target virus, comprising:
a. contacting a population of cells a portion of which comprises the target virus with an RNA effector molecule that inhibits the growth or replication of the target virus;
b. detecting the presence of the target virus in each cell; and,
c. isolating at least one cell that is substantially devoid of the target virus.

2. The method of claim 1, further comprising repeating steps a-c.

3. The method of claim 2, further comprising detecting the presence or absence of target viral nucleic acid or protein.

4. The method of claim 3, wherein the isolated cell is free of the target virus.

5. The method of claim 4, wherein steps a-c are repeated when target viral nucleic acid or protein is detected.

6. The method of claim 5, wherein the target viral nucleic acid is detected by a method selected from the group consisting of: polymerase chain reaction (PCR), reverse transcription polymerase chain reaction (RT-PCR), rapid amplification of cDNA ends (RACE), dot blot hybridization, Northern hybridization, and Southern hybridization.

7. The method of claim 5, wherein the target viral protein is detected by a method selected from the group consisting of: radioimmunoassay, competitive-binding assay, ELISA, Western blot, FACS, immunohistochemistry, immunoprecipitation, proteomics, mass spectrometry, electrophoresis, and immunofluoresence.

8. The method of claim 1, wherein the presence of the target virus of step b. is immunologically detected.

9. The method of claim 8, wherein the presence of the target virus is detected using an antibody against a capsid protein (Cap).

10. The method of claim 1, wherein the cell further comprises a second virus.

11. The method of claim 10, further comprising detecting the presence of the second virus.

12. The method of claim 11, wherein the presence of the second virus is detected by detection of viral nucleic acid or viral protein of the second virus.

13. The method of claim 12, wherein the second viral nucleic acid is detected by a method selected from the group consisting of: polymerase chain reaction (PCR), reverse transcription polymerase chain reaction (RT-PCR), rapid amplification of cDNA ends (RACE), dot blot hybridization, Northern hybridization, and Southern hybridization.

14. The method of claim 12, wherein the second viral protein is detected by a method selected from the group consisting of: radioimmunoassay, competitive-binding assay, ELISA, Western blot, FACS, immunohistochemistry, immunoprecipitation, proteomics, mass spectrometry, electrophoresis, and immunofluoresence.

15. The method of claim 10, wherein the second virus is rotavirus.

16. The method of claim 1, wherein the target virus is a non-integrating virus.

17. The method of claim 16, wherein the non-integrating virus is porcine circovirus.

18. The method of claim 1, wherein the RNA effector molecule is detectably labeled.

19. The method of claim 1, further comprising detecting the presence of the RNA effector molecule in the cell.

20. A cell that is substantially devoid of a target virus, obtained by the process of claim 1.

21. A method of producing an immunogenic agent, comprising:
(a) culturing the cell of claim 20 under conditions that allow expression of the immunogenic agent; and,
(b) isolating the immunogenic agent.

22. A method of preparing a virus stock that is substantially devoid of an unwanted target virus, comprising:
(a) contacting a virus stock that contains unwanted target virus with an agent that binds specifically with the unwanted target virus; and
(b) collecting the unbound virus stock.

23. The method of claim 22, further comprising repeating steps (a) and (b).

24. The method of claim 22, further comprising detecting the presence or absence of target viral nucleic acid or protein from the virus stock.

25. The method of claim 22, wherein the agent is immobilized.

26. The method of claim 22, wherein the agent is a receptor, an antibody, or an antigen binding fragment thereof.

27. The method of claim 26, wherein the agent is an antibody that binds to the porcine circovirus-1 (PCV-1).

28. The method of claim 27, wherein the antibody binds to the porcine circovirus-1 (PCV-1) capsid (Cap) protein.

29. The method of claim 26, wherein the agent is a receptor and the receptor is heparin.

30. The method of claim 22, wherein the agent is a receptor on a cell surface.

31. The method of claim 30, wherein the receptor on a cell surface is heparin.

32. The method of claim 22, further comprising contacting the cell with a RNA effector molecule that increases the presence of the receptor on the cell surface.

33. The method of claim 32, wherein the RNA effector molecule targets the heparanase gene.

34. The method of claim 30, wherein the cell does not have a receptor that binds the desired virus of the virus stock.

35. The method of claim 34, wherein the receptor is sialic acid.

36. The method of claim 30, wherein the cell is treated to have decreased level of cell receptor to the desired virus stock.

37. The method of claim 36, wherein the cell is treated by physical, chemical, or enzymatic means.

38. The method of claim 34, wherein the presence of a cell receptor to the desired viral stock has been decreased by contacting the cell with a RNA effector molecule that inhibits expression of the cell receptor.

39. The method of claim 30, further comprising
(a) contacting the unbound virus stock with a host cell;
(b) contacting the cell with an RNA effector molecule that inhibits growth or replication of the unwanted target virus; and
(c) isolating the virus stock from the medium.

40. The method of claim 39, wherein the host cell does not have a receptor for the unwanted target virus.

41. A virus stock that is substantially devoid of unwanted target virus prepared by the method of claim 22.

42. The virus stock of claim 41, wherein the virus stock is rotavirus.

43. The virus stock of claim 42, wherein the unwanted target virus is PCV1.

44. A biological product made using the virus stock of claim 41.

45. The biological product of claim 44, wherein the product is rotavirus vaccine.

46. A method of preparing a virus stock that is substantially devoid of an unwanted target virus, comprising:
(a) propagating a virus stock in a host cell in which expression of a receptor for a suspected viral contaminant has been inhibited; and
(b) collecting the virus stock.

47. The method of claim 46, wherein the receptor is heparin.

48. The method of claim 47, wherein the heparin is inhibited by contacting the host cell with a RNA effector molecule that targets an epimerase, a xylosyltransferase, a galactosyltransferase, a N-acetylglucosaminyl transferase, a glucuronosyl transferase, or a 2-O sulfotransferase gene.

49. The method of claim 46, further comprising contacting the host cell with a RNA effector molecule that inhibits the growth or replication of the unwanted target virus.

50. The method of claim 46, wherein the unwanted target virus is PCV1.

51. A virus stock that is substantially devoid of an unwanted target virus, prepared by the method of claim 46.

52. The virus stock of claim 51, wherein the virus stock is rotavirus.

53. A biological product made using the virus stock of claim 51.

54. The biological product of claim 53, wherein the product is rotavirus vaccine.

55. A virus stock that is substantially devoid of an unwanted target virus, prepared by the process comprising:
(a) contacting a virus stock that contains unwanted target virus with an agent that binds specifically with the unwanted target virus; and
(b) collecting the unbound virus stock.

56. A virus stock that is substantially devoid of an unwanted target virus, prepared by the process comprising:
(a) propagating a virus stock in a host cell in which expression of a receptor for a suspected viral contaminant has been inhibited; and
(b) collecting the stock virus.

The application's sequence listing, which the Patent Office published only in electronic form, follows.

SEQUENCE LISTING (2434 sequences)

SEQ ID NO: 1 - protein, 16 aa, Drosophila sp.
RQIKIWFQNRRMKWKK

SEQ ID NO: 2 - protein, 13 aa, Human immunodeficiency virus
GRKKRRQRRRPPQ

SEQ ID NO: 3 - protein, 27 aa, Unknown
  Description of Unknown: Signal Sequence-based cell permeation peptide
GALFLGWLGAAGSTMGAWSQPKKKRKV

SEQ ID NO: 4 - protein, 18 aa, Unknown
  Description of Unknown: PVEC cell permeation peptide
LLIILRRRIRKQAHAHSK

SEQ ID NO: 5 - protein, 26 aa, Unknown
  Description of Unknown: Transportan cell permeation peptide
GWTLNSAGYLLKINLKALAALAKKIL

SEQ ID NO: 6 - protein, 18 aa, Unknown
  Description of Unknown: Amphiphilic model cell permeation peptide
KLALKLALKALKAALKLA

SEQ ID NO: 7 - protein, 9 aa, Artificial Sequence
  Description of Artificial Sequence: Synthetic peptide
RRRRRRRRR

SEQ ID NO: 8 - protein, 10 aa, Unknown
  Description of Unknown: Bacterial cell wall permeation peptide
KFFKFFKFFK

SEQ ID NO: 9 - protein, 37 aa, Unknown
  Description of Unknown: LL-37 cell permeation peptide
LLGDFFRKSKEKIGKEFKRIVQRIKDFLRNLVPRTES

SEQ ID NO: 10 - protein, 31 aa, Unknown
  Description of Unknown: Cecropin P1 cell permeation peptide
SWLSKTAKKLENSAKKRISEGIAIAIQGGPR

SEQ ID NO: 11 - protein, 30 aa, Unknown
  Description of Unknown: Alpha-defensin cell permeation peptide
ACYCRIPACIAGERRYGTCIYQGRLWAFCC

SEQ ID NO: 12 - protein, 36 aa, Unknown
  Description of Unknown: b-defensin cell permeation peptide
DHYNCVSSGGQCLYSACPIFTKIQGTCYRGKAKCCK

SEQ ID NO: 13 - protein, 12 aa, Unknown
  Description of Unknown: Bactenecin cell permeation peptide
RKCRIVVIRVCR

SEQ ID NO: 14 - protein, 42 aa, Unknown
  Description of Unknown: PR-39 cell permeation peptide
RRRPRPPYLPRPRPPPFFPPRLPPRIPPGFPPRFPPRFPGKR

SEQ ID NO: 15 - protein, 13 aa, Unknown
  Description of Unknown: Indolicidin cell permeation peptide
ILPWKWPWWPWRR

SEQ ID NO: 16 - RNA, 19 nt, Artificial Sequence
  Description of Artificial Sequence: Synthetic oligonucleotide
augccaagcaagaaaagcg

SEQ ID NO: 17 - RNA, 19 nt, Artificial Sequence
  Description of Artificial Sequence: Synthetic oligonucleotide
ugccaagcaagaaaagcgg

SEQ ID NO: 18 - RNA, 19 nt, Artificial Sequence
  Description of Artificial Sequence: Synthetic oligonucleotide
gccaagcaagaaaagcggc

SEQ ID NO: 19 - RNA, 19 nt, Artificial Sequence
  Description of Artificial Sequence: Synthetic oligonucleotide
ccaagcaagaaaagcggcc

SEQ ID NO: 20 - RNA, 19 nt, Artificial Sequence
  Description of Artificial Sequence: Synthetic oligonucleotide
caagcaagaaaagcggccc

SEQ ID NO: 21 - RNA, 19 nt, Artificial Sequence
  Description of Artificial Sequence: Synthetic oligonucleotide
aagcaagaaaagcggcccg

SEQ ID NO: 22 - RNA, 19 nt, Artificial Sequence
  Description of Artificial Sequence: Synthetic oligonucleotide
caagaaaagcggcccgcaa

SEQ ID NO: 23 - RNA, 19 nt, Artificial Sequence
  Description of Artificial Sequence: Synthetic oligonucleotide
aagaaaagcggcccgcaac

SEQ ID NO: 24 - RNA, 19 nt, Artificial Sequence
  Description of Artificial Sequence: Synthetic oligonucleotide
ccgcaaccccauaagaggu

SEQ ID NO: 25 - RNA, 19 nt, Artificial Sequence
  Description of Artificial Sequence: Synthetic oligonucleotide
cgcaaccccauaagaggug

SEQ ID NO: 26 - RNA, 19 nt, Artificial Sequence
  Description of Artificial Sequence: Synthetic oligonucleotide
gcaaccccauaagaggugg

SEQ ID NO: 27 - RNA, 19 nt, Artificial Sequence
  Description of Artificial Sequence: Synthetic oligonucleotide
caaccccauaagagguggg

SEQ ID NO: 28 - RNA, 19 nt, Artificial Sequence
  Description of Artificial Sequence: Synthetic oligonucleotide
aaccccauaagaggugggu

SEQ ID NO: 29 - RNA, 19 nt, Artificial Sequence
  Description of Artificial Sequence: Synthetic oligonucleotide
accccauaagaggugggug

SEQ ID NO: 30 - RNA, 19 nt, Artificial Sequence
  Description of Artificial Sequence: Synthetic oligonucleotide
ccccauaagaggugggugu

SEQ ID NO: 31 - RNA, 19 nt, Artificial Sequence
  Description of Artificial Sequence: Synthetic oligonucleotide
cccauaagagguggguguu

SEQ ID NO: 32 - RNA, 19 nt, Artificial Sequence
  Description of Artificial Sequence: Synthetic oligonucleotide
ccauaagagguggguguuc

SEQ ID NO: 33 - RNA, 19 nt, Artificial Sequence
  Description of Artificial Sequence: Synthetic oligonucleotide
cauaagagguggguguuca

SEQ ID NO: 34 - RNA, 19 nt, Artificial Sequence
  Description of Artificial Sequence: Synthetic oligonucleotide
auaagagguggguguucac

SEQ ID NO: 35 - RNA, 19 nt, Artificial Sequence
  Description of Artificial Sequence: Synthetic oligonucleotide
uaagagguggguguucacc

SEQ ID NO: 36 - RNA, 19 nt, Artificial Sequence
  Description of Artificial Sequence: Synthetic oligonucleotide
aagagguggguguucaccc

SEQ ID NO: 37 - RNA, 19 nt, Artificial Sequence
  Description of Artificial Sequence: Synthetic oligonucleotide
agagguggguguucacccu

SEQ ID NO: 38 - RNA, 19 nt, Artificial Sequence
  Description of Artificial Sequence: Synthetic oligonucleotide
gagguggguguucacccuu

SEQ ID NO: 39 - RNA, 19 nt, Artificial Sequence
  Description of Artificial Sequence: Synthetic oligonucleotide
agguggguguucacccuua

SEQ ID NO: 40 - RNA, 19 nt, Artificial Sequence
  Description of Artificial Sequence: Synthetic oligonucleotide
gguggguguucacccuuaa

SEQ ID NO: 41 - RNA, 19 nt, Artificial Sequence
  Description of Artificial Sequence: Synthetic oligonucleotide
guggguguucacccuuaau

SEQ ID NO: 42 - RNA, 19 nt, Artificial Sequence
  Description of Artificial Sequence: Synthetic oligonucleotide
uggguguucacccuuaaua

SEQ ID NO: 43 - RNA, 19 nt, Artificial Sequence
  Description of Artificial Sequence: Synthetic oligonucleotide
ggguguucacccuuaauaa

SEQ ID NO: 44 - RNA, 19 nt, Artificial Sequence
  Description of Artificial Sequence: Synthetic oligonucleotide
gguguucacccuuaauaau

SEQ ID NO: 45 - RNA, 19 nt, Artificial Sequence
  Description of Artificial Sequence: Synthetic oligonucleotide
guguucacccuuaauaauc

SEQ ID NO: 46 - RNA, 19 nt, Artificial Sequence
  Description of Artificial Sequence: Synthetic oligonucleotide
uguucacccuuaauaaucc

SEQ ID NO: 47 - RNA, 19 nt, Artificial Sequence
  Description of Artificial Sequence: Synthetic oligonucleotide
guucacccuuaauaauccu

SEQ ID NO: 48 - RNA, 19 nt, Artificial Sequence
  Description of Artificial Sequence: Synthetic oligonucleotide
uucacccuuaauaauccuu

SEQ ID NO: 49 - RNA, 19 nt, Artificial Sequence
  Description of Artificial Sequence: Synthetic oligonucleotide
ucacccuuaauaauccuuc

SEQ ID NO: 50 - RNA, 19 nt, Artificial Sequence
  Description of Artificial Sequence: Synthetic oligonucleotide
cacccuuaauaauccuucc

SEQ ID NO: 51 - RNA, 19 nt, Artificial Sequence
  Description of Artificial Sequence: Synthetic oligonucleotide
acccuuaauaauccuuccg

SEQ ID NO: 52 - RNA, 19 nt, Artificial Sequence
  Description of Artificial Sequence: Synthetic oligonucleotide
cccuuaauaauccuuccga

SEQ ID NO: 53 - RNA, 19 nt, Artificial Sequence
  Description of Artificial Sequence: Synthetic oligonucleotide
ccuuaauaauccuuccgag

SEQ ID NO: 54 - RNA, 19 nt, Artificial Sequence
  Description of Artificial Sequence: Synthetic oligonucleotide
cuuaauaauccuuccgagg

SEQ ID NO: 55 - RNA, 19 nt, Artificial Sequence
  Description of Artificial Sequence: Synthetic oligonucleotide
uuaauaauccuuccgagga

SEQ ID NO: 56 - RNA, 19 nt, Artificial Sequence
  Description of Artificial Sequence: Synthetic oligonucleotide
uaauaauccuuccgaggag

SEQ ID NO: 57 - RNA, 19 nt, Artificial Sequence
  Description of Artificial Sequence: Synthetic oligonucleotide
aauaauccuuccgaggagg

SEQ ID NO: 58 - RNA, 19 nt, Artificial Sequence
  Description of Artificial Sequence: Synthetic oligonucleotide
auaauccuuccgaggagga

SEQ ID NO: 59 - RNA, 19 nt, Artificial Sequence
  Description of Artificial Sequence: Synthetic oligonucleotide
uaauccuuccgaggaggag

SEQ ID NO: 60 - RNA, 19 nt, Artificial Sequence
  Description of Artificial Sequence: Synthetic oligonucleotide
aauccuuccgaggaggaga

SEQ ID NO: 61 - RNA, 19 nt, Artificial Sequence
  Description of Artificial Sequence: Synthetic oligonucleotide
auccuuccgaggaggagaa

SEQ ID NO: 62 - RNA, 19 nt, Artificial Sequence
  Description of Artificial Sequence: Synthetic oligonucleotide
uccuuccgaggaggagaaa

SEQ ID NO: 63 - RNA, 19 nt, Artificial Sequence
  Description of Artificial Sequence: Synthetic oligonucleotide
ccuuccgaggaggagaaaa

SEQ ID NO: 64 - RNA, 19 nt, Artificial Sequence
  Description of Artificial Sequence: Synthetic oligonucleotide
aaacaaaauacgggagcuu

SEQ ID NO: 65 - RNA, 19 nt, Artificial Sequence
  Description of Artificial Sequence: Synthetic oligonucleotide
aacaaaauacgggagcuuc

SEQ ID NO: 66 - RNA, 19 nt, Artificial Sequence
  Description of Artificial Sequence: Synthetic oligonucleotide
acaaaauacgggagcuucc

SEQ ID NO: 67 - RNA, 19 nt, Artificial Sequence
  Description of Artificial Sequence: Synthetic oligonucleotide
caaaauacgggagcuucca

SEQ ID NO: 68 - RNA, 19 nt, Artificial Sequence
  Description of Artificial Sequence: Synthetic oligonucleotide
aaaauacgggagcuuccaa

SEQ ID NO: 69 - RNA, 19 nt, Artificial Sequence
  Description of Artificial Sequence: Synthetic oligonucleotide
aaauacgggagcuuccaau

SEQ ID NO: 70 - RNA, 19 nt, Artificial Sequence
  Description of Artificial Sequence: Synthetic oligonucleotide
aauacgggagcuuccaauc

SEQ ID NO: 71 - RNA, 19 nt, Artificial Sequence
  Description of Artificial Sequence: Synthetic oligonucleotide
auacgggagcuuccaaucu

SEQ ID NO: 72 - RNA, 19 nt, Artificial Sequence
  Description of Artificial Sequence: Synthetic oligonucleotide
uacgggagcuuccaaucuc

SEQ ID NO: 73 - RNA, 19 nt, Artificial Sequence
  Description of Artificial Sequence: Synthetic oligonucleotide
acgggagcuuccaaucucc

SEQ ID NO: 74 - RNA, 19 nt, Artificial Sequence
  Description of Artificial Sequence: Synthetic oligonucleotide
gggagcuuccaaucucccu

SEQ ID NO: 75 - RNA, 19 nt, Artificial Sequence
  Description of Artificial Sequence: Synthetic oligonucleotide
ggagcuuccaaucucccuu

SEQ ID NO: 76 - RNA, 19 nt, Artificial Sequence
  Description of Artificial Sequence: Synthetic oligonucleotide
gagcuuccaaucucccuuu

SEQ ID NO: 77 - RNA, 19 nt, Artificial Sequence
  Description of Artificial Sequence: Synthetic oligonucleotide
agcuuccaaucucccuuuu

SEQ ID NO: 78 - RNA, 19 nt, Artificial Sequence
  Description of Artificial Sequence: Synthetic oligonucleotide
uuugauuauuuuguuugcg

SEQ ID NO: 79 - RNA, 19 nt, Artificial Sequence
  Description of Artificial Sequence: Synthetic oligonucleotide
uugauuauuuuguuugcgg

SEQ ID NO: 80 - RNA, 19 nt, Artificial Sequence
  Description of Artificial Sequence: Synthetic oligonucleotide
ugauuauuuuguuugcgga

SEQ ID NO: 81 - RNA, 19 nt, Artificial Sequence
  Description of Artificial Sequence: Synthetic oligonucleotide
gauuauuuuguuugcggag

SEQ ID NO: 82 - RNA, 19 nt, Artificial Sequence
  Description of Artificial Sequence: Synthetic oligonucleotide
auuauuuuguuugcggaga

SEQ ID NO: 83 - RNA, 19 nt, Artificial Sequence
  Description of Artificial Sequence: Synthetic oligonucleotide
uuauuuuguuugcggagag

SEQ ID NO: 84 - RNA, 19 nt, Artificial Sequence
  Description of Artificial Sequence: Synthetic oligonucleotide
uauuuuguuugcggagagg

SEQ ID NO: 85 - RNA, 19 nt, Artificial Sequence
  Description of Artificial Sequence: Synthetic oligonucleotide
auuuuguuugcggagagga

SEQ ID NO: 86 - RNA, 19 nt, Artificial Sequence
  Description of Artificial Sequence: Synthetic oligonucleotide
uuuuguuugcggagaggaa

SEQ ID NO: 87 - RNA, 19 nt, Artificial Sequence
  Description of Artificial Sequence: Synthetic oligonucleotide
uuuguuugcggagaggaag

SEQ ID NO: 88 - RNA, 19 nt, Artificial Sequence
  Description of Artificial Sequence: Synthetic oligonucleotide
uuguuugcggagaggaagg

SEQ ID NO: 89 - RNA, 19 nt, Artificial Sequence
  Description of Artificial Sequence: Synthetic oligonucleotide
uguuugcggagaggaaggu

SEQ ID NO: 90 - RNA, 19 nt, Artificial Sequence
  Description of Artificial Sequence: Synthetic oligonucleotide
guuugcggagaggaagguu

SEQ ID NO: 91 - RNA, 19 nt, Artificial Sequence
  Description of Artificial Sequence: Synthetic oligonucleotide
uuugcggagaggaagguuu

SEQ ID NO: 92 - RNA, 19 nt, Artificial Sequence
  Description of Artificial Sequence: Synthetic oligonucleotide
uugcggagaggaagguuug

SEQ ID NO: 93 - RNA, 19 nt, Artificial Sequence
  Description of Artificial Sequence: Synthetic oligonucleotide
ugcggagaggaagguuugg

SEQ ID NO: 94 - RNA, 19 nt, Artificial Sequence
  Description of Artificial Sequence: Synthetic oligonucleotide
gcggagaggaagguuugga

SEQ ID NO: 95 - RNA, 19 nt, Artificial Sequence
  Description of Artificial Sequence: Synthetic oligonucleotide
cggagaggaagguuuggaa

SEQ ID NO: 96 - RNA, 19 nt, Artificial Sequence
  Description of Artificial Sequence: Synthetic oligonucleotide
ggagaggaagguuuggaag

SEQ ID NO: 97 - RNA, 19 nt, Artificial Sequence
  Description of Artificial Sequence: Synthetic oligonucleotide
gagaggaagguuuggaaga

SEQ ID NO: 98 - RNA, 19 nt, Artificial Sequence
  Description of Artificial Sequence: Synthetic oligonucleotide
agaggaagguuuggaagag

SEQ ID NO: 99 - RNA, 19 nt, Artificial Sequence
  Description of Artificial Sequence: Synthetic oligonucleotide
gaggaagguuuggaagagg

SEQ ID NO: 100 - RNA, 19 nt, Artificial Sequence
  Description of Artificial Sequence: Synthetic oligonucleotide
aggaagguuuggaagaggg

SEQ ID NO: 101 - RNA, 19 nt, Artificial Sequence
  Description of Artificial Sequence: Synthetic oligonucleotide
ggaagguuuggaagagggu

SEQ ID NO: 102 - RNA, 19 nt, Artificial Sequence
  Description of Artificial Sequence: Synthetic oligonucleotide
gaagguuuggaagagggua

SEQ ID NO: 103 - RNA, 19 nt, Artificial Sequence
  Description of Artificial Sequence: Synthetic oligonucleotide
aagguuuggaagaggguag

SEQ ID NO: 104 - RNA, 19 nt, Artificial Sequence
  Description of Artificial Sequence: Synthetic oligonucleotide
agguuuggaagaggguaga

SEQ ID NO: 105 - RNA, 19 nt, Artificial Sequence
  Description of Artificial Sequence: Synthetic oligonucleotide
gguuuggaagaggguagaa

SEQ ID NO: 106 - RNA, 19 nt, Artificial Sequence
  Description of Artificial Sequence: Synthetic oligonucleotide
guuuggaagaggguagaac

SEQ ID NO: 107 - RNA, 19 nt, Artificial Sequence
  Description of Artificial Sequence: Synthetic oligonucleotide
uuuggaagaggguagaacu

SEQ ID NO: 108 - RNA, 19 nt, Artificial Sequence
  Description of Artificial Sequence: Synthetic oligonucleotide
uuggaagaggguagaacuc

SEQ ID NO: 109 - RNA, 19 nt, Artificial Sequence
  Description of Artificial Sequence: Synthetic oligonucleotide
ggaagaggguagaacuccu

SEQ ID NO: 110 - RNA, 19 nt, Artificial Sequence
  Description of Artificial Sequence: Synthetic oligonucleotide
gaagaggguagaacuccuc

SEQ ID NO: 111 - RNA, 19 nt, Artificial Sequence
  Description of Artificial Sequence: Synthetic oligonucleotide
aagaggguagaacuccuca

SEQ ID NO: 112 - RNA, 19 nt, Artificial Sequence
  Description of Artificial Sequence: Synthetic oligonucleotide
agaggguagaacuccucac

SEQ ID NO: 113 - RNA, 19 nt, Artificial Sequence
  Description of Artificial Sequence: Synthetic oligonucleotide
gaggguagaacuccucacc

SEQ ID NO: 114 - RNA, 19 nt, Artificial Sequence
  Description of Artificial Sequence: Synthetic oligonucleotide
aggguagaacuccucaccu

SEQ ID NO: 115 - RNA, 19 nt, Artificial Sequence
  Description of Artificial Sequence: Synthetic oligonucleotide
ggguagaacuccucaccuc

SEQ ID NO: 116 - RNA, 19 nt, Artificial Sequence
  Description of Artificial Sequence: Synthetic oligonucleotide
gguagaacuccucaccucc

SEQ ID NO: 117 - RNA, 19 nt, Artificial Sequence
  Description of Artificial Sequence: Synthetic oligonucleotide
guagaacuccucaccucca

SEQ ID NO: 118 - RNA, 19 nt, Artificial Sequence
  Description of Artificial Sequence: Synthetic oligonucleotide
uagaacuccucaccuccag

SEQ ID NO: 119 - RNA, 19 nt, Artificial Sequence
  Description of Artificial Sequence: Synthetic oligonucleotide
agaacuccucaccuccagg

SEQ ID NO: 120 - RNA, 19 nt, Artificial Sequence
  Description of Artificial Sequence: Synthetic oligonucleotide
uccucaccuccagggguuu

SEQ ID NO: 121 - RNA, 19 nt, Artificial Sequence
  Description of Artificial Sequence: Synthetic oligonucleotide
accuccagggguuugcgaa

SEQ ID NO: 122 - RNA, 19 nt, Artificial Sequence
  Description of Artificial Sequence: Synthetic oligonucleotide
ccuccagggguuugcgaau

SEQ ID NO: 123 - RNA, 19 nt, Artificial Sequence
  Description of Artificial Sequence: Synthetic oligonucleotide
cuccagggguuugcgaauu

SEQ ID NO: 124 - RNA, 19 nt, Artificial Sequence
  Description of Artificial Sequence: Synthetic oligonucleotide
uccagggguuugcgaauuu

SEQ ID NO: 125 - RNA, 19 nt, Artificial Sequence
  Description of Artificial Sequence: Synthetic oligonucleotide
ggguuugcgaauuuugcua

SEQ ID NO: 126 - RNA, 19 nt, Artificial Sequence
  Description of Artificial Sequence: Synthetic oligonucleotide
gguuugcgaauuuugcuaa

SEQ ID NO: 127 - RNA, 19 nt, Artificial Sequence
  Description of Artificial Sequence: Synthetic oligonucleotide
guuugcgaauuuugcuaag

SEQ ID NO: 128 - RNA, 19 nt, Artificial Sequence
  Description of Artificial Sequence: Synthetic oligonucleotide
uuugcgaauuuugcuaaga

SEQ ID NO: 129 - RNA, 19 nt, Artificial Sequence
  Description of Artificial Sequence: Synthetic oligonucleotide
uugcgaauuuugcuaagaa

SEQ ID NO: 130 - RNA, 19 nt, Artificial Sequence
  Description of Artificial Sequence: Synthetic oligonucleotide
ugcgaauuuugcuaagaag

SEQ ID NO: 131 - RNA, 19 nt, Artificial Sequence
  Description of Artificial Sequence: Synthetic oligonucleotide
gcgaauuuugcuaagaagc

SEQ ID NO: 132 - RNA, 19 nt, Artificial Sequence
  Description of Artificial Sequence: Synthetic oligonucleotide
cgaauuuugcuaagaagca

SEQ ID NO: 133 - RNA, 19 nt, Artificial Sequence
  Description of Artificial Sequence: Synthetic oligonucleotide
gaauuuugcuaagaagcag

SEQ ID NO: 134 - RNA, 19 nt, Artificial Sequence
  Description of Artificial Sequence: Synthetic oligonucleotide
aauuuugcuaagaagcaga

SEQ ID NO: 135 - RNA, 19 nt, Artificial Sequence
  Description of Artificial Sequence: Synthetic oligonucleotide
auuuugcuaagaagcagac

SEQ ID NO: 136 - RNA, 19 nt, Artificial Sequence
  Description of Artificial Sequence: Synthetic oligonucleotide
uuuugcuaagaagcagacu

SEQ ID NO: 137 - RNA, 19 nt, Artificial Sequence
  Description of Artificial Sequence: Synthetic oligonucleotide
uuugcuaagaagcagacuu

SEQ ID NO: 138 - RNA, 19 nt, Artificial Sequence
  Description of Artificial Sequence: Synthetic oligonucleotide
uugcuaagaagcagacuuu

SEQ ID NO: 139 - RNA, 19 nt, Artificial Sequence
  Description of Artificial Sequence: Synthetic oligonucleotide
ugcuaagaagcagacuuuu

SEQ ID NO: 140 - RNA, 19 nt, Artificial Sequence
  Description of Artificial Sequence: Synthetic oligonucleotide
gcuaagaagcagacuuuua

SEQ ID NO: 141 - RNA, 19 nt, Artificial Sequence
  Description of Artificial Sequence: Synthetic oligonucleotide
cuaagaagcagacuuuuaa

SEQ ID NO: 142 - RNA, 19 nt, Artificial Sequence
  Description of Artificial Sequence: Synthetic oligonucleotide
uaagaagcagacuuuuaac

SEQ ID NO: 143 - RNA, 19 nt, Artificial Sequence
  Description of Artificial Sequence: Synthetic oligonucleotide
aagaagcagacuuuuaaca

SEQ ID NO: 144 - RNA, 19 nt, Artificial Sequence
  Description of Artificial Sequence: Synthetic oligonucleotide
agaagcagacuuuuaacaa

SEQ ID NO: 145 - RNA, 19 nt, Artificial Sequence
  Description of Artificial Sequence: Synthetic oligonucleotide
gaagcagacuuuuaacaag

SEQ ID NO: 146 - RNA, 19 nt, Artificial Sequence
  Description of Artificial Sequence: Synthetic oligonucleotide
aagcagacuuuuaacaagg

SEQ ID NO: 147 - RNA, 19 nt, Artificial Sequence
  Description of Artificial Sequence: Synthetic oligonucleotide
agcagacuuuuaacaaggu

SEQ ID NO: 148 - RNA, 19 nt, Artificial Sequence
  Description of Artificial Sequence: Synthetic oligonucleotide
gcagacuuuuaacaaggug

SEQ ID NO: 149 - RNA, 19 nt, Artificial Sequence
  Description of Artificial Sequence: Synthetic oligonucleotide
cagacuuuuaacaagguga

SEQ ID NO: 150 - RNA, 19 nt, Artificial Sequence
  Description of Artificial Sequence: Synthetic oligonucleotide
agacuuuuaacaaggugaa

SEQ ID NO: 151 - RNA, 19 nt, Artificial Sequence
  Description of Artificial Sequence: Synthetic oligonucleotide
gacuuuuaacaaggugaag

SEQ ID NO: 152 - RNA, 19 nt, Artificial Sequence
  Description of Artificial Sequence: Synthetic oligonucleotide
acuuuuaacaaggugaagu

SEQ ID NO: 153 - RNA, 19 nt, Artificial Sequence
  Description of Artificial Sequence: Synthetic oligonucleotide
cuuuuaacaaggugaagug

SEQ ID NO: 154 - RNA, 19 nt, Artificial Sequence
  Description of Artificial Sequence: Synthetic oligonucleotide
uuuuaacaaggugaagugg

SEQ ID NO: 155 - RNA, 19 nt, Artificial Sequence
  Description of Artificial Sequence: Synthetic oligonucleotide
uuuaacaaggugaaguggu

SEQ ID NO: 156 - RNA, 19 nt, Artificial Sequence
  Description of Artificial Sequence: Synthetic oligonucleotide
uuaacaaggugaaguggua

SEQ ID NO: 157 - RNA, 19 nt, Artificial Sequence
  Description of Artificial Sequence: Synthetic oligonucleotide
uaacaaggugaagugguau

SEQ ID NO: 158 - RNA, 19 nt, Artificial Sequence
  Description of Artificial Sequence: Synthetic oligonucleotide
aacaaggugaagugguauu

SEQ ID NO: 159 - RNA, 19 nt, Artificial Sequence
  Description of Artificial Sequence: Synthetic oligonucleotide
acaaggugaagugguauuu

SEQ ID NO: 160 - RNA, 19 nt, Artificial Sequence
  Description of Artificial Sequence: Synthetic oligonucleotide
caaggugaagugguauuuu

SEQ ID NO: 161 - RNA, 19 nt, Artificial Sequence
  Description of Artificial Sequence: Synthetic oligonucleotide
aaggugaagugguauuuug

SEQ ID NO: 162 - RNA, 19 nt, Artificial Sequence
  Description of Artificial Sequence: Synthetic oligonucleotide
aggugaagugguauuuugg

SEQ ID NO: 163 - RNA, 19 nt, Artificial Sequence
  Description of Artificial Sequence: Synthetic oligonucleotide
ggugaagugguauuuuggu

SEQ ID NO: 164 - RNA, 19 nt, Artificial Sequence
  Description of Artificial Sequence: Synthetic oligonucleotide
gugaagugguauuuuggug

SEQ ID NO: 165 - RNA, 19 nt, Artificial Sequence
  Description of Artificial Sequence: Synthetic oligonucleotide
ugaagugguauuuuggugc

SEQ ID NO: 166 - RNA, 19 nt, Artificial Sequence
  Description of Artificial Sequence: Synthetic oligonucleotide
gaagugguauuuuggugcc

SEQ ID NO: 167 - RNA, 19 nt, Artificial Sequence
  Description of Artificial Sequence: Synthetic oligonucleotide
aagugguauuuuggugccc

SEQ ID NO: 168 - RNA, 19 nt, Artificial Sequence
  Description of Artificial Sequence: Synthetic oligonucleotide
agugguauuuuggugcccg

SEQ ID NO: 169 - RNA, 19 nt, Artificial Sequence
  Description of Artificial Sequence: Synthetic oligonucleotide
gugguauuuuggugcccgc

SEQ ID NO: 170 - RNA, 19 nt, Artificial Sequence
  Description of Artificial Sequence: Synthetic oligonucleotide
ugguauuuuggugcccgcu

SEQ ID NO: 171 - RNA, 19 nt, Artificial Sequence
  Description of Artificial Sequence: Synthetic oligonucleotide
gguauuuuggugcccgcug

SEQ ID NO: 172 - RNA, 19 nt, Artificial Sequence
  Description of Artificial Sequence: Synthetic oligonucleotide
guauuuuggugcccgcugc

SEQ ID NO: 173 - RNA, 19 nt, Artificial Sequence
  Description of Artificial Sequence: Synthetic oligonucleotide
uauuuuggugcccgcugcc

SEQ ID NO: 174 - RNA, 19 nt, Artificial Sequence
  Description of Artificial Sequence: Synthetic oligonucleotide
auuuuggugcccgcugcca

SEQ ID NO: 175 - RNA, 19 nt, Artificial Sequence
  Description of Artificial Sequence: Synthetic oligonucleotide
ccgcugccacaucgagaaa

SEQ ID NO: 176 - RNA, 19 nt, Artificial Sequence
  Description of Artificial Sequence: Synthetic oligonucleotide
cgcugccacaucgagaaag

SEQ ID NO: 177 - RNA, 19 nt, Artificial Sequence
  Description of Artificial Sequence: Synthetic oligonucleotide
gcugccacaucgagaaagc

SEQ ID NO: 178 - RNA, 19 nt, Artificial Sequence
  Description of Artificial Sequence: Synthetic oligonucleotide
cugccacaucgagaaagcg

SEQ ID NO: 179 - RNA, 19 nt, Artificial Sequence
  Description of Artificial Sequence: Synthetic oligonucleotide
ugccacaucgagaaagcga

SEQ ID NO: 180 - RNA, 19 nt, Artificial Sequence
  Description of Artificial Sequence: Synthetic oligonucleotide
gccacaucgagaaagcgaa

SEQ ID NO: 181 - RNA, 19 nt, Artificial Sequence
  Description of Artificial Sequence: Synthetic oligonucleotide
ccacaucgagaaagcgaaa

SEQ ID NO: 182 - RNA, 19 nt, Artificial Sequence
  Description of Artificial Sequence: Synthetic oligonucleotide
cacaucgagaaagcgaaag

SEQ ID NO: 183 - RNA, 19 nt, Artificial Sequence
  Description of Artificial Sequence: Synthetic oligonucleotide
acaucgagaaagcgaaagg

SEQ ID NO: 184 - RNA, 19 nt, Artificial Sequence
  Description of Artificial Sequence: Synthetic oligonucleotide
caucgagaaagcgaaagga

SEQ ID NO: 185 - RNA, 19 nt, Artificial Sequence
  Description of Artificial Sequence: Synthetic oligonucleotide
aucgagaaagcgaaaggaa

SEQ ID NO: 186 - RNA, 19 nt, Artificial Sequence
  Description of Artificial Sequence: Synthetic oligonucleotide
ucgagaaagcgaaaggaac

SEQ ID NO: 187 - RNA, 19 nt, Artificial Sequence
  Description of Artificial Sequence: Synthetic oligonucleotide
cgagaaagcgaaaggaacc

SEQ ID NO: 188 - RNA, 19 nt, Artificial Sequence
  Description of Artificial Sequence: Synthetic oligonucleotide
gagaaagcgaaaggaaccg

SEQ ID NO: 189 - RNA, 19 nt, Artificial Sequence
  Description of Artificial Sequence: Synthetic oligonucleotide
agaaagcgaaaggaaccga

SEQ ID NO: 190 - RNA, 19 nt, Artificial Sequence
  Description of Artificial Sequence: Synthetic oligonucleotide
gaaagcgaaaggaaccgac

SEQ ID NO: 191 - RNA, 19 nt, Artificial Sequence
  Description of Artificial Sequence: Synthetic oligonucleotide
aaagcgaaaggaaccgacc

SEQ ID NO: 192 - RNA, 19 nt, Artificial Sequence
  Description of Artificial Sequence: Synthetic oligonucleotide
aagcgaaaggaaccgacca

SEQ ID NO: 193 - RNA, 19 nt, Artificial Sequence
  Description of Artificial Sequence: Synthetic oligonucleotide
agcgaaaggaaccgaccag

SEQ ID NO: 194 - RNA, 19 nt, Artificial Sequence
  Description of Artificial Sequence: Synthetic oligonucleotide
cgaaaggaaccgaccagca

SEQ ID NO: 195 - RNA, 19 nt, Artificial Sequence
  Description of Artificial Sequence: Synthetic oligonucleotide
gaaaggaaccgaccagcag

SEQ ID NO: 196 - RNA, 19 nt, Artificial Sequence
  Description of Artificial Sequence: Synthetic oligonucleotide
aaaggaaccgaccagcaga

SEQ ID NO: 197 - RNA, 19 nt, Artificial Sequence
  Description of Artificial Sequence: Synthetic oligonucleotide
aaggaaccgaccagcagaa

SEQ ID NO: 198 - RNA, 19 nt, Artificial Sequence
  Description of Artificial Sequence: Synthetic oligonucleotide
aggaaccgaccagcagaau

SEQ ID NO: 199 - RNA, 19 nt, Artificial Sequence
  Description of Artificial Sequence: Synthetic oligonucleotide
ggaaccgaccagcagaaua

SEQ ID NO: 200 - RNA, 19 nt, Artificial Sequence
  Description of Artificial Sequence: Synthetic oligonucleotide
gaaccgaccagcagaauaa

SEQ ID NO: 201 - RNA, 19 nt, Artificial Sequence
  Description of Artificial Sequence: Synthetic oligonucleotide
aaccgaccagcagaauaaa

SEQ ID NO: 202 - RNA, 19 nt, Artificial Sequence
  Description of Artificial Sequence: Synthetic oligonucleotide
accgaccagcagaauaaag

SEQ ID NO: 203 - RNA, 19 nt, Artificial Sequence
  Description of Artificial Sequence: Synthetic oligonucleotide
ccgaccagcagaauaaaga

SEQ ID NO: 204 - RNA, 19 nt, Artificial Sequence
  Description of Artificial Sequence: Synthetic oligonucleotide
cgaccagcagaauaaagaa

SEQ ID NO: 205 - RNA, 19 nt, Artificial Sequence
  Description of Artificial Sequence: Synthetic oligonucleotide
gaccagcagaauaaagaau

SEQ ID NO: 206 - RNA, 19 nt, Artificial Sequence
  Description of Artificial Sequence: Synthetic oligonucleotide
accagcagaauaaagaaua

SEQ ID NO: 207 - RNA, 19 nt, Artificial Sequence
  Description of Artificial Sequence: Synthetic oligonucleotide
ccagcagaauaaagaauac

SEQ ID NO: 208 - RNA, 19 nt, Artificial Sequence
  Description of Artificial Sequence: Synthetic oligonucleotide
cagcagaauaaagaauacu

SEQ ID NO: 209 - RNA, 19 nt, Artificial Sequence
  Description of Artificial Sequence: Synthetic oligonucleotide
agcagaauaaagaauacug

SEQ ID NO: 210 - RNA, 19 nt, Artificial Sequence
  Description of Artificial Sequence: Synthetic oligonucleotide
gcagaauaaagaauacugc

SEQ ID NO: 211 - RNA, 19 nt, Artificial Sequence
  Description of Artificial Sequence: Synthetic oligonucleotide
cagaauaaagaauacugca

SEQ ID NO: 212 - RNA, 19 nt, Artificial Sequence
  Description of Artificial Sequence: Synthetic oligonucleotide
agaauaaagaauacugcag

SEQ ID NO: 213 - RNA, 19 nt, Artificial Sequence
  Description of Artificial Sequence: Synthetic oligonucleotide
gaauaaagaauacugcagu

SEQ ID NO: 214 - RNA, 19 nt, Artificial Sequence
  Description of Artificial Sequence: Synthetic oligonucleotide
aauaaagaauacugcagua

SEQ ID NO: 215 - RNA, 19 nt, Artificial Sequence
  Description of Artificial Sequence: Synthetic oligonucleotide
auaaagaauacugcaguaa

SEQ ID NO: 216 - RNA, 19 nt, Artificial Sequence
  Description of Artificial Sequence: Synthetic oligonucleotide
uaaagaauacugcaguaaa

SEQ ID NO: 217 - RNA, 19 nt, Artificial Sequence
  Description of Artificial Sequence: Synthetic oligonucleotide
aaagaauacugcaguaaag

SEQ ID NO: 218 - RNA, 19 nt, Artificial Sequence
  Description of Artificial Sequence: Synthetic oligonucleotide
aagaauacugcaguaaaga

SEQ ID NO: 219 - RNA, 19 nt, Artificial Sequence
  Description of Artificial Sequence: Synthetic oligonucleotide
agaauacugcaguaaagaa

SEQ ID NO: 220 - RNA, 19 nt, Artificial Sequence
  Description of Artificial Sequence: Synthetic oligonucleotide
gaauacugcaguaaagaag

SEQ ID NO: 221 - RNA, 19 nt, Artificial Sequence
  Description of Artificial Sequence: Synthetic oligonucleotide
aauacugcaguaaagaagg

SEQ ID NO: 222 - RNA, 19 nt, Artificial Sequence
  Description of Artificial Sequence: Synthetic oligonucleotide
auacugcaguaaagaaggc

SEQ ID NO: 223 - RNA, 19 nt, Artificial Sequence
  Description of Artificial Sequence: Synthetic oligonucleotide
uacugcaguaaagaaggcc

SEQ ID NO: 224 - RNA, 19 nt, Artificial Sequence
  Description of Artificial Sequence: Synthetic oligonucleotide
acugcaguaaagaaggcca

SEQ ID NO: 225 - RNA, 19 nt, Artificial Sequence
  Description of Artificial Sequence: Synthetic oligonucleotide
cugcaguaaagaaggccac

SEQ ID NO: 226 - RNA, 19 nt, Artificial Sequence
  Description of Artificial Sequence: Synthetic oligonucleotide
ugcaguaaagaaggccaca

SEQ ID NO: 227 - RNA, 19 nt, Artificial Sequence
  Description of Artificial Sequence: Synthetic oligonucleotide
gcaguaaagaaggccacau

SEQ ID NO: 228 - RNA, 19 nt, Artificial Sequence
  Description of Artificial Sequence: Synthetic oligonucleotide
caguaaagaaggccacaua

SEQ ID NO: 229 - RNA, 19 nt, Artificial Sequence
  Description of Artificial Sequence: Synthetic oligonucleotide
aguaaagaaggccacauac

SEQ ID NO: 230 - RNA, 19 nt, Artificial Sequence
  Description of Artificial Sequence: Synthetic oligonucleotide
guaaagaaggccacauacu

SEQ ID NO: 231 - RNA, 19 nt, Artificial Sequence
  Description of Artificial Sequence: Synthetic oligonucleotide
uaaagaaggccacauacuu

SEQ ID NO: 232 - RNA, 19 nt, Artificial Sequence
  Description of Artificial Sequence: Synthetic oligonucleotide
aaagaaggccacauacuua

SEQ ID NO: 233 - RNA, 19 nt, Artificial Sequence
  Description of Artificial Sequence: Synthetic oligonucleotide
aagaaggccacauacuuau

SEQ ID NO: 234 - RNA, 19 nt, Artificial Sequence
  Description of Artificial Sequence: Synthetic oligonucleotide
agaaggccacauacuuauc

SEQ ID NO: 235 - RNA, 19 nt, Artificial Sequence
  Description of Artificial Sequence: Synthetic oligonucleotide
gaaggccacauacuuaucg

SEQ ID NO: 236 - RNA, 19 nt, Artificial Sequence
  Description of Artificial Sequence: Synthetic oligonucleotide
aaggccacauacuuaucga

SEQ ID NO: 237 - RNA, 19 nt, Artificial Sequence
  Description of Artificial Sequence: Synthetic oligonucleotide
aggccacauacuuaucgag

SEQ ID NO: 238 - RNA, 19 nt, Artificial Sequence
  Description of Artificial Sequence: Synthetic oligonucleotide
ggccacauacuuaucgagu

SEQ ID NO: 239 - RNA, 19 nt, Artificial Sequence
  Description of Artificial Sequence: Synthetic oligonucleotide
gccacauacuuaucgagug

SEQ ID NO: 240 - RNA, 19 nt, Artificial Sequence
  Description of Artificial Sequence: Synthetic oligonucleotide
ccacauacuuaucgagugu

SEQ ID NO: 241 - RNA, 19 nt, Artificial Sequence
  Description of Artificial Sequence: Synthetic oligonucleotide
cacauacuuaucgagugug

SEQ ID NO: 242 - RNA, 19 nt, Artificial Sequence
  Description of Artificial Sequence: Synthetic oligonucleotide
acauacuuaucgagugugg

SEQ ID NO: 243 - RNA, 19 nt, Artificial Sequence
  Description of Artificial Sequence: Synthetic oligonucleotide
cauacuuaucgagugugga

SEQ ID NO: 244 - RNA, 19 nt, Artificial Sequence
  Description of Artificial Sequence: Synthetic oligonucleotide
auacuuaucgaguguggag

SEQ ID NO: 245 - RNA, 19 nt, Artificial Sequence
  Description of Artificial Sequence: Synthetic oligonucleotide
uacuuaucgaguguggagc

SEQ ID NO: 246 - RNA, 19 nt, Artificial Sequence
  Description of Artificial Sequence: Synthetic oligonucleotide
acuuaucgaguguggagcu

SEQ ID NO: 247 - RNA, 19 nt, Artificial Sequence
  Description of Artificial Sequence: Synthetic oligonucleotide
cuuaucgaguguggagcuc

SEQ ID NO: 248 - RNA, 19 nt, Artificial Sequence
  Description of Artificial Sequence: Synthetic oligonucleotide
uuaucgaguguggagcucc

SEQ ID NO: 249 - RNA, 19 nt, Artificial Sequence
  Description of Artificial Sequence: Synthetic oligonucleotide
uaucgaguguggagcuccg

SEQ ID NO: 250 - RNA, 19 nt, Artificial Sequence
  Description of Artificial Sequence: Synthetic oligonucleotide
aagcgcagcgaccugucua

SEQ ID NO: 251 - RNA, 19 nt, Artificial Sequence
  Description of Artificial Sequence: Synthetic oligonucleotide
cagcgaccugucuacugcu

SEQ ID NO: 252 - RNA, 19 nt, Artificial Sequence
  Description of Artificial Sequence: Synthetic oligonucleotide
agcgaccugucuacugcug

SEQ ID NO: 253 - RNA, 19 nt, Artificial Sequence
  Description of Artificial Sequence: Synthetic oligonucleotide
gcgaccugucuacugcugu

SEQ ID NO: 254 - RNA, 19 nt, Artificial Sequence
  Description of Artificial Sequence: Synthetic oligonucleotide
cgaccugucuacugcugug

SEQ ID NO: 255 - RNA, 19 nt, Artificial Sequence
  Description of Artificial Sequence: Synthetic oligonucleotide
gaccugucuacugcuguga

SEQ ID NO: 256 - RNA, 19 nt, Artificial Sequence
  Description of Artificial Sequence: Synthetic oligonucleotide
accugucuacugcugugag

SEQ ID NO: 257 - RNA, 19 nt, Artificial Sequence
  Description of Artificial Sequence: Synthetic oligonucleotide
ccugucuacugcugugagu

SEQ ID NO: 258 - RNA, 19 nt, Artificial Sequence
  Description of Artificial Sequence: Synthetic oligonucleotide
cugucuacugcugugagua

SEQ ID NO: 259 - RNA, 19 nt, Artificial Sequence
  Description of Artificial Sequence: Synthetic oligonucleotide
ugucuacugcugugaguac

SEQ ID NO: 260 - RNA, 19 nt, Artificial Sequence
  Description of Artificial Sequence: Synthetic oligonucleotide
gucuacugcugugaguacc

SEQ ID NO: 261 - RNA, 19 nt, Artificial Sequence
  Description of Artificial Sequence: Synthetic oligonucleotide
ucuacugcugugaguaccc

SEQ ID NO: 262 - RNA, 19 nt, Artificial Sequence
  Description of Artificial Sequence: Synthetic oligonucleotide
cuacugcugugaguacccu

SEQ ID NO: 263 - RNA, 19 nt, Artificial Sequence
  Description of Artificial Sequence: Synthetic oligonucleotide
uacugcugugaguacccuu

SEQ ID NO: 264 - RNA, 19 nt, Artificial Sequence
  Description of Artificial Sequence: Synthetic oligonucleotide
acugcugugaguacccuuu

SEQ ID NO: 265 - RNA, 19 nt, Artificial Sequence
  Description of Artificial Sequence: Synthetic oligonucleotide
cugcugugaguacccuuuu

SEQ ID NO: 266 - RNA, 19 nt, Artificial Sequence
  Description of Artificial Sequence: Synthetic oligonucleotide
ugcugugaguacccuuuug

SEQ ID NO: 267 - RNA, 19 nt, Artificial Sequence
  Description of Artificial Sequence: Synthetic oligonucleotide
gcugugaguacccuuuugg

SEQ ID NO: 268 - RNA, 19 nt, Artificial Sequence
  Description of Artificial Sequence: Synthetic oligonucleotide
cugugaguacccuuuugga

SEQ ID NO: 269 - RNA, 19 nt, Artificial Sequence
  Description of Artificial Sequence: Synthetic oligonucleotide
ugugaguacccuuuuggag

SEQ ID NO: 270 - RNA, 19 nt, Artificial Sequence
  Description of Artificial Sequence: Synthetic oligonucleotide
gugaguacccuuuuggaga

SEQ ID NO: 271 - RNA, 19 nt, Artificial Sequence
  Description of Artificial Sequence: Synthetic oligonucleotide
ugaguacccuuuuggagac

SEQ ID NO: 272 - RNA, 19 nt, Artificial Sequence
  Description of Artificial Sequence: Synthetic oligonucleotide
gaguacccuuuuggagacg

SEQ ID NO: 273 - RNA, 19 nt, Artificial Sequence
  Description of Artificial Sequence: Synthetic oligonucleotide
aguacccuuuuggagacgg

SEQ ID NO: 274 - RNA, 19 nt, Artificial Sequence
  Description of Artificial Sequence: Synthetic oligonucleotide
guacccuuuuggagacggg

SEQ ID NO: 275 - RNA, 19 nt, Artificial Sequence
  Description of Artificial Sequence: Synthetic oligonucleotide
uuuggagacggggucuuug

SEQ ID NO: 276 - RNA, 19 nt, Artificial Sequence
  Description of Artificial Sequence: Synthetic oligonucleotide
uuggagacggggucuuugg

SEQ ID NO: 277 - RNA, 19 nt, Artificial Sequence
  Description of Artificial Sequence: Synthetic oligonucleotide
uggagacggggucuuuggu

SEQ ID NO: 278 - RNA, 19 nt, Artificial Sequence
  Description of Artificial Sequence: Synthetic oligonucleotide
gagacggggucuuugguga

SEQ ID NO: 279 - RNA, 19 nt, Artificial Sequence
  Description of Artificial Sequence: Synthetic oligonucleotide
agacggggucuuuggugac

SEQ ID NO: 280 - RNA, 19 nt, Artificial Sequence
  Description of Artificial Sequence: Synthetic oligonucleotide
gacggggucuuuggugacu

SEQ ID NO: 281 - RNA, 19 nt, Artificial Sequence
  Description of Artificial Sequence: Synthetic oligonucleotide
acggggucuuuggugacug

SEQ ID NO: 282 - RNA, 19 nt, Artificial Sequence
  Description of Artificial Sequence: Synthetic oligonucleotide
cggggucuuuggugacugu

SEQ ID NO: 283 - RNA, 19 nt, Artificial Sequence
  Description of Artificial Sequence: Synthetic oligonucleotide
ggggucuuuggugacugua

SEQ ID NO: 284 - RNA, 19 nt, Artificial Sequence
  Description of Artificial Sequence: Synthetic oligonucleotide
gggucuuuggugacuguag

SEQ ID NO: 285 - RNA, 19 nt, Artificial Sequence
  Description of Artificial Sequence: Synthetic oligonucleotide
ggucuuuggugacuguagc

SEQ ID NO: 286 - RNA, 19 nt, Artificial Sequence
  Description of Artificial Sequence: Synthetic oligonucleotide
gucuuuggugacuguagcc

SEQ ID NO: 287 - RNA, 19 nt, Artificial Sequence
  Description of Artificial Sequence: Synthetic oligonucleotide
ucuuuggugacuguagccg

SEQ ID NO: 288 - RNA, 19 nt, Artificial Sequence
  Description of Artificial Sequence: Synthetic oligonucleotide
cuuuggugacuguagccga

SEQ ID NO: 289 - RNA, 19 nt, Artificial Sequence
  Description of Artificial Sequence: Synthetic oligonucleotide
uuuggugacuguagccgag

SEQ ID NO: 290 - RNA, 19 nt, Artificial Sequence
  Description of Artificial Sequence: Synthetic oligonucleotide
uuggugacuguagccgagc

SEQ ID NO: 291 - RNA, 19 nt, Artificial Sequence
  Description of Artificial Sequence: Synthetic oligonucleotide
uggugacuguagccgagca

SEQ ID NO: 292 - RNA, 19 nt, Artificial Sequence
  Description of Artificial Sequence: Synthetic oligonucleotide
gugacuguagccgagcagu

SEQ ID NO: 293 - RNA, 19 nt, Artificial Sequence
  Description of Artificial Sequence: Synthetic oligonucleotide
ugacuguagccgagcaguu

SEQ ID NO: 294 - RNA, 19 nt, Artificial Sequence
  Description of Artificial Sequence: Synthetic oligonucleotide
gacuguagccgagcaguuc

SEQ ID NO: 295 - RNA, 19 nt, Artificial Sequence
  Description of Artificial Sequence: Synthetic oligonucleotide
acuguagccgagcaguucc

SEQ ID NO: 296 - RNA, 19 nt, Artificial Sequence
  Description of Artificial Sequence: Synthetic oligonucleotide
uguagccgagcaguucccu

SEQ ID NO: 297 - RNA, 19 nt, Artificial Sequence
  Description of Artificial Sequence: Synthetic oligonucleotide
uagccgagcaguucccugu

SEQ ID NO: 298 - RNA, 19 nt, Artificial Sequence
  Description of Artificial Sequence: Synthetic oligonucleotide
agccgagcaguucccugua

SEQ ID NO: 299 - RNA, 19 nt, Artificial Sequence
  Description of Artificial Sequence: Synthetic oligonucleotide
gccgagcaguucccuguaa

SEQ ID NO: 300 - RNA, 19 nt, Artificial Sequence
  Description of Artificial Sequence: Synthetic oligonucleotide
ccgagcaguucccuguaac

SEQ ID NO: 301 - RNA, 19 nt, Artificial Sequence
  Description of Artificial Sequence: Synthetic oligonucleotide
cgagcaguucccuguaacg

SEQ ID NO: 302 - RNA, 19 nt, Artificial Sequence
  Description of Artificial Sequence: Synthetic oligonucleotide
gagcaguucccuguaacgu

SEQ ID NO: 303 - RNA, 19 nt, Artificial Sequence
  Description of Artificial Sequence: Synthetic oligonucleotide
agcaguucccuguaacgua

SEQ ID NO: 304 - RNA, 19 nt, Artificial Sequence
  Description of Artificial Sequence: Synthetic oligonucleotide
gcaguucccuguaacguau

SEQ ID NO: 305 - RNA, 19 nt, Artificial Sequence
  Description of Artificial Sequence: Synthetic oligonucleotide
caguucccuguaacguaug

SEQ ID NO: 306 - RNA, 19 nt, Artificial Sequence
  Description of Artificial Sequence: Synthetic oligonucleotide
aguucccuguaacguaugu

SEQ ID NO: 307 - RNA, 19 nt, Artificial Sequence
  Description of Artificial Sequence: Synthetic oligonucleotide
guucccuguaacguaugug

SEQ ID NO: 308 - RNA, 19 nt, Artificial Sequence
  Description of Artificial Sequence: Synthetic oligonucleotide
uucccuguaacguauguga

SEQ ID NO: 309 - RNA, 19 nt, Artificial Sequence
  Description of Artificial Sequence: Synthetic oligonucleotide
ucccuguaacguaugugag

SEQ ID NO: 310 - RNA, 19 nt, Artificial Sequence
  Description of Artificial Sequence: Synthetic oligonucleotide
cccuguaacguaugugaga

SEQ ID NO: 311 - RNA, 19 nt, Artificial Sequence
  Description of Artificial Sequence: Synthetic oligonucleotide
ccuguaacguaugugagaa

SEQ ID NO: 312 - RNA, 19 nt, Artificial Sequence
  Description of Artificial Sequence: Synthetic oligonucleotide
cuguaacguaugugagaaa

SEQ ID NO: 313 - RNA, 19 nt, Artificial Sequence
  Description of Artificial Sequence: Synthetic oligonucleotide
uguaacguaugugagaaau

SEQ ID NO: 314 - RNA, 19 nt, Artificial Sequence
  Description of Artificial Sequence: Synthetic oligonucleotide
guaacguaugugagaaauu

SEQ ID NO: 315 - RNA, 19 nt, Artificial Sequence
  Description of Artificial Sequence: Synthetic oligonucleotide
uaacguaugugagaaauuu

SEQ ID NO: 316 - RNA, 19 nt, Artificial Sequence
  Description of Artificial Sequence: Synthetic oligonucleotide
aacguaugugagaaauuuc

SEQ ID NO: 317 - RNA, 19 nt, Artificial Sequence
  Description of Artificial Sequence: Synthetic oligonucleotide
acguaugugagaaauuucc

SEQ ID NO: 318 - RNA, 19 nt, Artificial Sequence
  Description of Artificial Sequence: Synthetic oligonucleotide
cguaugugagaaauuuccg

SEQ ID NO: 319 - RNA, 19 nt, Artificial Sequence
  Description of Artificial Sequence: Synthetic oligonucleotide
guaugugagaaauuuccgc

SEQ ID NO: 320 - RNA, 19 nt, Artificial Sequence
  Description of Artificial Sequence: Synthetic oligonucleotide
uaugugagaaauuuccgcg

SEQ ID NO: 321 - RNA, 19 nt, Artificial Sequence
  Description of Artificial Sequence: Synthetic oligonucleotide
augugagaaauuuccgcgg

SEQ ID NO: 322 - RNA, 19 nt, Artificial Sequence
  Description of Artificial Sequence: Synthetic oligonucleotide
ugugagaaauuuccgcggg

SEQ ID NO: 323 - RNA, 19 nt, Artificial Sequence
  Description of Artificial Sequence: Synthetic oligonucleotide
gugagaaauuuccgcgggc

SEQ ID NO: 324 - RNA, 19 nt, Artificial Sequence
  Description of Artificial Sequence: Synthetic oligonucleotide
ugagaaauuuccgcgggcu

SEQ ID NO: 325 - RNA, 19 nt, Artificial Sequence
  Description of Artificial Sequence: Synthetic oligonucleotide
gagaaauuuccgcgggcug

SEQ ID NO: 326 - RNA, 19 nt, Artificial Sequence
  Description of Artificial Sequence: Synthetic oligonucleotide
agaaauuuccgcgggcugg

SEQ ID NO: 327 - RNA, 19 nt, Artificial Sequence
  Description of Artificial Sequence: Synthetic oligonucleotide
aaauuuccgcgggcuggcu

SEQ ID NO: 328 - RNA, 19 nt, Artificial Sequence
  Description of Artificial Sequence: Synthetic oligonucleotide
gcgggcuggcugaacuuuu

SEQ ID NO: 329 - RNA, 19 nt, Artificial Sequence
  Description of Artificial Sequence: Synthetic oligonucleotide
cgggcuggcugaacuuuug

SEQ ID NO: 330 - RNA, 19 nt, Artificial Sequence
  Description of Artificial Sequence: Synthetic oligonucleotide
gggcuggcugaacuuuuga

SEQ ID NO: 331 - RNA, 19 nt, Artificial Sequence
  Description of Artificial Sequence: Synthetic oligonucleotide
ggcuggcugaacuuuugaa

SEQ ID NO: 332 - RNA, 19 nt, Artificial Sequence
  Description of Artificial Sequence: Synthetic oligonucleotide
gcuggcugaacuuuugaaa

SEQ ID NO: 333 - RNA, 19 nt, Artificial Sequence
  Description of Artificial Sequence: Synthetic oligonucleotide
cuggcugaacuuuugaaag

SEQ ID NO: 334 - RNA, 19 nt, Artificial Sequence
  Description of Artificial Sequence: Synthetic oligonucleotide
uggcugaacuuuugaaagu

SEQ ID NO: 335 - RNA, 19 nt, Artificial Sequence
  Description of Artificial Sequence: Synthetic oligonucleotide
ggcugaacuuuugaaagug

SEQ ID NO: 336 - RNA, 19 nt, Artificial Sequence
  Description of Artificial Sequence: Synthetic oligonucleotide
gcugaacuuuugaaaguga

SEQ ID NO: 337 - RNA, 19 nt, Artificial Sequence
  Description of Artificial Sequence: Synthetic oligonucleotide
cugaacuuuugaaagugag

SEQ ID NO: 338 - RNA, 19 nt, Artificial Sequence
  Description of Artificial Sequence: Synthetic oligonucleotide
ugaacuuuugaaagugagc

SEQ ID NO: 339 - RNA, 19 nt, Artificial Sequence
  Description of Artificial Sequence: Synthetic oligonucleotide
gaacuuuugaaagugagcg

SEQ ID NO: 340 - RNA, 19 nt, Artificial Sequence
  Description of Artificial Sequence: Synthetic oligonucleotide
aacuuuugaaagugagcgg

SEQ ID NO: 341 - RNA, 19 nt, Artificial Sequence
  Description of Artificial Sequence: Synthetic oligonucleotide
acuuuugaaagugagcggg

SEQ ID NO: 342 - RNA, 19 nt, Artificial Sequence
  Description of Artificial Sequence: Synthetic oligonucleotide
cuuuugaaagugagcggga

SEQ ID NO: 343 - RNA, 19 nt, Artificial Sequence
  Description of Artificial Sequence: Synthetic oligonucleotide
uuuugaaagugagcgggaa

SEQ ID NO: 344 - RNA, 19 nt, Artificial Sequence
  Description of Artificial Sequence: Synthetic oligonucleotide
uuugaaagugagcgggaag

SEQ ID NO: 345 - RNA, 19 nt, Artificial Sequence
  Description of Artificial Sequence: Synthetic oligonucleotide
uugaaagugagcgggaaga

SEQ ID NO: 346 - RNA, 19 nt, Artificial Sequence
  Description of Artificial Sequence: Synthetic oligonucleotide
ugaaagugagcgggaagau

SEQ ID NO: 347 - RNA, 19 nt, Artificial Sequence
  Description of Artificial Sequence: Synthetic oligonucleotide
gaaagugagcgggaagaug

SEQ ID NO: 348 - RNA, 19 nt, Artificial Sequence
  Description of Artificial Sequence: Synthetic oligonucleotide
aaagugagcgggaagaugc

SEQ ID NO: 349 - RNA, 19 nt, Artificial Sequence
  Description of Artificial Sequence: Synthetic oligonucleotide
aagugagcgggaagaugca

SEQ ID NO: 350 - RNA, 19 nt, Artificial Sequence
  Description of Artificial Sequence: Synthetic oligonucleotide
agugagcgggaagaugcag

SEQ ID NO: 351 - RNA, 19 nt, Artificial Sequence
  Description of Artificial Sequence: Synthetic oligonucleotide
ugagcgggaagaugcagca

SEQ ID NO: 352 - RNA, 19 nt, Artificial Sequence
  Description of Artificial Sequence: Synthetic oligonucleotide
ggaagaugcagcagcguga

SEQ ID NO: 353 - RNA, 19 nt, Artificial Sequence
  Description of Artificial Sequence: Synthetic oligonucleotide
gaagaugcagcagcgugau

SEQ ID NO: 354 - RNA, 19 nt, Artificial Sequence
  Description of Artificial Sequence: Synthetic oligonucleotide
aagaugcagcagcgugauu

SEQ ID NO: 355 - RNA, 19 nt, Artificial Sequence
  Description of Artificial Sequence: Synthetic oligonucleotide
agaugcagcagcgugauug

SEQ ID NO: 356 - RNA, 19 nt, Artificial Sequence
  Description of Artificial Sequence: Synthetic oligonucleotide
gaugcagcagcgugauugg

SEQ ID NO: 357 - RNA, 19 nt, Artificial Sequence
  Description of Artificial Sequence: Synthetic oligonucleotide
augcagcagcgugauugga

SEQ ID NO: 358 - RNA, 19 nt, Artificial Sequence
  Description of Artificial Sequence: Synthetic oligonucleotide
ugcagcagcgugauuggaa

SEQ ID NO: 359 - RNA, 19 nt, Artificial Sequence
  Description of Artificial Sequence: Synthetic oligonucleotide
gcagcagcgugauuggaag

SEQ ID NO: 360 - RNA, 19 nt, Artificial Sequence
  Description of Artificial Sequence: Synthetic oligonucleotide
cagcagcgugauuggaaga

SEQ ID NO: 361 - RNA, 19 nt, Artificial Sequence
  Description of Artificial Sequence: Synthetic oligonucleotide
agcagcgugauuggaagac

SEQ ID NO: 362 - RNA, 19 nt, Artificial Sequence
  Description of Artificial Sequence: Synthetic oligonucleotide
gcagcgugauuggaagaca

SEQ ID NO: 363 - RNA, 19 nt, Artificial Sequence
  Description of Artificial Sequence: Synthetic oligonucleotide
cagcgugauuggaagacag

SEQ ID NO: 364 - RNA, 19 nt, Artificial Sequence
  Description of Artificial Sequence: Synthetic oligonucleotide
agcgugauuggaagacagc

SEQ ID NO: 365 - RNA, 19 nt, Artificial Sequence
  Description of Artificial Sequence: Synthetic oligonucleotide
gcgugauuggaagacagcu

SEQ ID NO: 366 - RNA, 19 nt, Artificial Sequence
  Description of Artificial Sequence: Synthetic oligonucleotide
cgugauuggaagacagcug

SEQ ID NO: 367 - RNA, 19 nt, Artificial Sequence
  Description of Artificial Sequence: Synthetic oligonucleotide
gugauuggaagacagcugu

SEQ ID NO: 368 - RNA, 19 nt, Artificial Sequence
  Description of Artificial Sequence: Synthetic oligonucleotide
ugauuggaagacagcugua

SEQ ID NO: 369 - RNA, 19 nt, Artificial Sequence
  Description of Artificial Sequence: Synthetic oligonucleotide
gauuggaagacagcuguac

SEQ ID NO: 370 - RNA, 19 nt, Artificial Sequence
  Description of Artificial Sequence: Synthetic oligonucleotide
auuggaagacagcuguaca

SEQ ID NO: 371 - RNA, 19 nt, Artificial Sequence
  Description of Artificial Sequence: Synthetic oligonucleotide
uuggaagacagcuguacac

SEQ ID NO: 372 - RNA, 19 nt, Artificial Sequence
  Description of Artificial Sequence: Synthetic oligonucleotide
uggaagacagcuguacacg

SEQ ID NO: 373 - RNA, 19 nt, Artificial Sequence
  Description of Artificial Sequence: Synthetic oligonucleotide
ggaagacagcuguacacgu

SEQ ID NO: 374 - RNA, 19 nt, Artificial Sequence
  Description of Artificial Sequence: Synthetic oligonucleotide
gaagacagcuguacacguc

SEQ ID NO: 375 - RNA, 19 nt, Artificial Sequence
  Description of Artificial Sequence: Synthetic oligonucleotide
aagacagcuguacacguca

SEQ ID NO: 376 - RNA, 19 nt, Artificial Sequence
  Description of Artificial Sequence: Synthetic oligonucleotide
agacagcuguacacgucau

SEQ ID NO: 377 - RNA, 19 nt, Artificial Sequence
  Description of Artificial Sequence: Synthetic oligonucleotide
gacagcuguacacgucaua

SEQ ID NO: 378 - RNA, 19 nt, Artificial Sequence
  Description of Artificial Sequence: Synthetic oligonucleotide
acagcuguacacgucauag

SEQ ID NO: 379 - RNA, 19 nt, Artificial Sequence
  Description of Artificial Sequence: Synthetic oligonucleotide
cagcuguacacgucauagu

SEQ ID NO: 380 - RNA, 19 nt, Artificial Sequence
  Description of Artificial Sequence: Synthetic oligonucleotide
agcuguacacgucauagug

SEQ ID NO: 381 - RNA, 19 nt, Artificial Sequence
  Description of Artificial Sequence: Synthetic oligonucleotide
gcuguacacgucauagugg

SEQ ID NO: 382 - RNA, 19 nt, Artificial Sequence
  Description of Artificial Sequence: Synthetic oligonucleotide
cuguacacgucauaguggg

SEQ ID NO: 383 - RNA, 19 nt, Artificial Sequence
  Description of Artificial Sequence: Synthetic oligonucleotide
uguacacgucauagugggc

SEQ ID NO: 384 - RNA, 19 nt, Artificial Sequence
  Description of Artificial Sequence: Synthetic oligonucleotide
guacacgucauagugggcc

SEQ ID NO: 385 - RNA, 19 nt, Artificial Sequence
  Description of Artificial Sequence: Synthetic oligonucleotide
uacacgucauagugggccc

SEQ ID NO: 386 - RNA, 19 nt, Artificial Sequence
  Description of Artificial Sequence: Synthetic oligonucleotide
gguugugggaagagccagu

SEQ ID NO: 387 - RNA, 19 nt, Artificial Sequence
  Description of Artificial Sequence: Synthetic oligonucleotide
guugugggaagagccagug

SEQ ID NO: 388 - RNA, 19 nt, Artificial Sequence
  Description of Artificial Sequence: Synthetic oligonucleotide
uugugggaagagccagugg

SEQ ID NO: 389 - RNA, 19 nt, Artificial Sequence
  Description of Artificial Sequence: Synthetic oligonucleotide
agccagugggcccguaauu

SEQ ID NO: 390 - RNA, 19 nt, Artificial Sequence
  Description of Artificial Sequence: Synthetic oligonucleotide
gccagugggcccguaauuu

SEQ ID NO: 391 - RNA, 19 nt, Artificial Sequence
  Description of Artificial Sequence: Synthetic oligonucleotide
ccagugggcccguaauuuu

SEQ ID NO: 392 - RNA, 19 nt, Artificial Sequence
  Description of Artificial Sequence: Synthetic oligonucleotide
cagugggcccguaauuuug

SEQ ID NO: 393 - RNA, 19 nt, Artificial Sequence
  Description of Artificial Sequence: Synthetic oligonucleotide
agugggcccguaauuuugc

SEQ ID NO: 394 - RNA, 19 nt, Artificial Sequence
  Description of Artificial Sequence: Synthetic oligonucleotide
gugggcccguaauuuugcu

SEQ ID NO: 395 - RNA, 19 nt, Artificial Sequence
  Description of Artificial Sequence: Synthetic oligonucleotide
ugggcccguaauuuugcug

SEQ ID NO: 396 - RNA, 19 nt, Artificial Sequence
  Description of Artificial Sequence: Synthetic oligonucleotide
gggcccguaauuuugcuga

SEQ ID NO: 397 - RNA, 19 nt, Artificial Sequence
  Description of Artificial Sequence: Synthetic oligonucleotide
ggcccguaauuuugcugag

SEQ ID NO: 398 - RNA, 19 nt, Artificial Sequence
  Description of Artificial Sequence: Synthetic oligonucleotide
gcccguaauuuugcugagc

SEQ ID NO: 399 - RNA, 19 nt, Artificial Sequence
  Description of Artificial Sequence: Synthetic oligonucleotide
cccguaauuuugcugagcc

SEQ ID NO: 400 - RNA, 19 nt, Artificial Sequence
  Description of Artificial Sequence: Synthetic oligonucleotide
ccguaauuuugcugagccu

SEQ ID NO: 401 - RNA, 19 nt, Artificial Sequence
  Description of Artificial Sequence: Synthetic oligonucleotide
cguaauuuugcugagccua

SEQ ID NO: 402 - RNA, 19 nt, Artificial Sequence
  Description of Artificial Sequence: Synthetic oligonucleotide
guaauuuugcugagccuag

SEQ ID NO: 403 - RNA, 19 nt, Artificial Sequence
  Description of Artificial Sequence: Synthetic oligonucleotide
uaauuuugcugagccuagc

SEQ ID NO: 404 - RNA, 19 nt, Artificial Sequence
  Description of Artificial Sequence: Synthetic oligonucleotide
aauuuugcugagccuagcg

SEQ ID NO: 405 - RNA, 19 nt, Artificial Sequence
  Description of Artificial Sequence: Synthetic oligonucleotide
auuuugcugagccuagcga

SEQ ID NO: 406 - RNA, 19 nt, Artificial Sequence
  Description of Artificial Sequence: Synthetic oligonucleotide
uuuugcugagccuagcgac

SEQ ID NO: 407 - RNA, 19 nt, Artificial Sequence
  Description of Artificial Sequence: Synthetic oligonucleotide
uuugcugagccuagcgaca

SEQ ID NO: 408 - RNA, 19 nt, Artificial Sequence
  Description of Artificial Sequence: Synthetic oligonucleotide
uugcugagccuagcgacac

SEQ ID NO: 409 - RNA, 19 nt, Artificial Sequence
  Description of Artificial Sequence: Synthetic oligonucleotide
cugagccuagcgacaccua

SEQ ID NO: 410 - RNA, 19 nt, Artificial Sequence
  Description of Artificial Sequence: Synthetic oligonucleotide
ugagccuagcgacaccuac

SEQ ID NO: 411 - RNA, 19 nt, Artificial Sequence
  Description of Artificial Sequence: Synthetic oligonucleotide
gagccuagcgacaccuacu

SEQ ID NO: 412 - RNA, 19 nt, Artificial Sequence
  Description of Artificial Sequence: Synthetic oligonucleotide
agccuagcgacaccuacug

SEQ ID NO: 413 - RNA, 19 nt, Artificial Sequence
  Description of Artificial Sequence: Synthetic oligonucleotide
ccuagcgacaccuacugga

SEQ ID NO: 414 - RNA, 19 nt, Artificial Sequence
  Description of Artificial Sequence: Synthetic oligonucleotide
cuagcgacaccuacuggaa

SEQ ID NO: 415 - RNA, 19 nt, Artificial Sequence
  Description of Artificial Sequence: Synthetic oligonucleotide
uagcgacaccuacuggaag

SEQ ID NO: 416 - RNA, 19 nt, Artificial Sequence
  Description of Artificial Sequence: Synthetic oligonucleotide
agcgacaccuacuggaagc

SEQ ID NO: 417 - RNA, 19 nt, Artificial Sequence
  Description of Artificial Sequence: Synthetic oligonucleotide
cgacaccuacuggaagccu

SEQ ID NO: 418 - RNA, 19 nt, Artificial Sequence
  Description of Artificial Sequence: Synthetic oligonucleotide
gacaccuacuggaagccua

SEQ ID NO: 419 - RNA, 19 nt, Artificial Sequence
  Description of Artificial Sequence: Synthetic oligonucleotide
acaccuacuggaagccuag

SEQ ID NO: 420 - RNA, 19 nt, Artificial Sequence
  Description of Artificial Sequence: Synthetic oligonucleotide
caccuacuggaagccuagu

SEQ ID NO: 421 - RNA, 19 nt, Artificial Sequence
  Description of Artificial Sequence: Synthetic oligonucleotide
accuacuggaagccuagua

SEQ ID NO: 422 - RNA, 19 nt, Artificial Sequence
  Description of Artificial Sequence: Synthetic oligonucleotide
ccuacuggaagccuaguag

SEQ ID NO: 423 - RNA, 19 nt, Artificial Sequence
  Description of Artificial Sequence: Synthetic oligonucleotide
cuacuggaagccuaguaga

SEQ ID NO: 424 - RNA, 19 nt, Artificial Sequence
  Description of Artificial Sequence: Synthetic oligonucleotide
uacuggaagccuaguagaa

SEQ ID NO: 425 - RNA, 19 nt, Artificial Sequence
  Description of Artificial Sequence: Synthetic oligonucleotide
acuggaagccuaguagaaa

SEQ ID NO: 426 - RNA, 19 nt, Artificial Sequence
  Description of Artificial Sequence: Synthetic oligonucleotide
cuggaagccuaguagaaau

SEQ ID NO: 427 - RNA, 19 nt, Artificial Sequence
  Description of Artificial Sequence: Synthetic oligonucleotide
uggaagccuaguagaaaua

SEQ ID NO: 428 - RNA, 19 nt, Artificial Sequence
  Description of Artificial Sequence: Synthetic oligonucleotide
ggaagccuaguagaaauaa

SEQ ID NO: 429 - RNA, 19 nt, Artificial Sequence
  Description of Artificial Sequence: Synthetic oligonucleotide
gaagccuaguagaaauaag

SEQ ID NO: 430 - RNA, 19 nt, Artificial Sequence
  Description of Artificial Sequence: Synthetic oligonucleotide
aagccuaguagaaauaagu

SEQ ID NO: 431 - RNA, 19 nt, Artificial Sequence
  Description of Artificial Sequence: Synthetic oligonucleotide
agccuaguagaaauaagug

SEQ ID NO: 432 - RNA, 19 nt, Artificial Sequence
  Description of Artificial Sequence: Synthetic oligonucleotide
gccuaguagaaauaagugg

SEQ ID NO: 433 - RNA, 19 nt, Artificial Sequence
  Description of Artificial Sequence: Synthetic oligonucleotide
ccuaguagaaauaaguggu

SEQ ID NO: 434 - RNA, 19 nt, Artificial Sequence
  Description of Artificial Sequence: Synthetic oligonucleotide
cuaguagaaauaaguggug

SEQ ID NO: 435 - RNA, 19 nt, Artificial Sequence
  Description of Artificial Sequence: Synthetic oligonucleotide
uaguagaaauaaguggugg

SEQ ID NO: 436 - RNA, 19 nt, Artificial Sequence
  Description of Artificial Sequence: Synthetic oligonucleotide
aguagaaauaagugguggg

SEQ ID NO: 437 - RNA, 19 nt, Artificial Sequence
  Description of Artificial Sequence: Synthetic oligonucleotide
guagaaauaagugguggga

SEQ ID NO: 438 - RNA, 19 nt, Artificial Sequence
  Description of Artificial Sequence: Synthetic oligonucleotide
uagaaauaaguggugggau

SEQ ID NO: 439 - RNA, 19 nt, Artificial Sequence
  Description of Artificial Sequence: Synthetic oligonucleotide
agaaauaaguggugggaug

SEQ ID NO: 440 - RNA, 19 nt, Artificial Sequence
  Description of Artificial Sequence: Synthetic oligonucleotide
gaaauaaguggugggaugg

SEQ ID NO: 441 - RNA, 19 nt, Artificial Sequence
  Description of Artificial Sequence: Synthetic oligonucleotide
aaauaaguggugggaugga

SEQ ID NO: 442 - RNA, 19 nt, Artificial Sequence
  Description of Artificial Sequence: Synthetic oligonucleotide
aauaaguggugggauggau

SEQ ID NO: 443 - RNA, 19 nt, Artificial Sequence
  Description of Artificial Sequence: Synthetic oligonucleotide
auaaguggugggauggaua

SEQ ID NO: 444 - RNA, 19 nt, Artificial Sequence
  Description of Artificial Sequence: Synthetic oligonucleotide
uaaguggugggauggauau

SEQ ID NO: 445 - RNA, 19 nt, Artificial Sequence
  Description of Artificial Sequence: Synthetic oligonucleotide
aaguggugggauggauauc

SEQ ID NO: 446 - RNA, 19 nt, Artificial Sequence
  Description of Artificial Sequence: Synthetic oligonucleotide
aguggugggauggauauca

SEQ ID NO: 447 - RNA, 19 nt, Artificial Sequence
  Description of Artificial Sequence: Synthetic oligonucleotide
guggugggauggauaucau

SEQ ID NO: 448 - RNA, 19 nt, Artificial Sequence
  Description of Artificial Sequence: Synthetic oligonucleotide
uggugggauggauaucaug

SEQ ID NO: 449 - RNA, 19 nt, Artificial Sequence
  Description of Artificial Sequence: Synthetic oligonucleotide
ggugggauggauaucaugg

SEQ ID NO: 450 - RNA, 19 nt, Artificial Sequence
  Description of Artificial Sequence: Synthetic oligonucleotide
gugggauggauaucaugga

SEQ ID NO: 451 - RNA, 19 nt, Artificial Sequence
  Description of Artificial Sequence: Synthetic oligonucleotide
ugggauggauaucauggag

SEQ ID NO: 452 - RNA, 19 nt, Artificial Sequence
  Description of Artificial Sequence: Synthetic oligonucleotide
gggauggauaucauggaga

SEQ ID NO: 453 - RNA, 19 nt, Artificial Sequence
  Description of Artificial Sequence: Synthetic oligonucleotide
ggauggauaucauggagaa

SEQ ID NO: 454 - RNA, 19 nt, Artificial Sequence
  Description of Artificial Sequence: Synthetic oligonucleotide
gauggauaucauggagaag

SEQ ID NO: 455 - RNA, 19 nt, Artificial Sequence
  Description of Artificial Sequence: Synthetic oligonucleotide
auggauaucauggagaaga

SEQ ID NO: 456 - RNA, 19 nt, Artificial Sequence
  Description of Artificial Sequence: Synthetic oligonucleotide
uggauaucauggagaagaa

SEQ ID NO: 457 - RNA, 19 nt, Artificial Sequence
  Description of Artificial Sequence: Synthetic oligonucleotide
ggauaucauggagaagaag

SEQ ID NO: 458 - RNA, 19 nt, Artificial Sequence
  Description of Artificial Sequence: Synthetic oligonucleotide
gauaucauggagaagaagu

SEQ ID NO: 459 - RNA, 19 nt, Artificial Sequence
  Description of Artificial Sequence: Synthetic oligonucleotide
auaucauggagaagaaguu

SEQ ID NO: 460 - RNA, 19 nt, Artificial Sequence
  Description of Artificial Sequence: Synthetic oligonucleotide
uaucauggagaagaaguug

SEQ ID NO: 461 - RNA, 19 nt, Artificial Sequence
  Description of Artificial Sequence: Synthetic oligonucleotide
aucauggagaagaaguugu

SEQ ID NO: 462 - RNA, 19 nt, Artificial Sequence
  Description of Artificial Sequence: Synthetic oligonucleotide
ucauggagaagaaguuguu

SEQ ID NO: 463 - RNA, 19 nt, Artificial Sequence
  Description of Artificial Sequence: Synthetic oligonucleotide
cauggagaagaaguuguug

SEQ ID NO: 464 - RNA, 19 nt, Artificial Sequence
  Description of Artificial Sequence: Synthetic oligonucleotide
auggagaagaaguuguugu

SEQ ID NO: 465 - RNA, 19 nt, Artificial Sequence
  Description of Artificial Sequence: Synthetic oligonucleotide
uggagaagaaguuguuguu

SEQ ID NO: 466 - RNA, 19 nt, Artificial Sequence
  Description of Artificial Sequence: Synthetic oligonucleotide
ggagaagaaguuguuguuu

SEQ ID NO: 467 - RNA, 19 nt, Artificial Sequence
  Description of Artificial Sequence: Synthetic oligonucleotide
gagaagaaguuguuguuuu

SEQ ID NO: 468 - RNA, 19 nt, Artificial Sequence
  Description of Artificial Sequence: Synthetic oligonucleotide
agaagaaguuguuguuuug

SEQ ID NO: 469 - RNA, 19 nt, Artificial Sequence
  Description of Artificial Sequence: Synthetic oligonucleotide
gaagaaguuguuguuuugg

SEQ ID NO: 470 - RNA, 19 nt, Artificial Sequence
  Description of Artificial Sequence: Synthetic oligonucleotide
aagaaguuguuguuuugga

SEQ ID NO: 471 - RNA, 19 nt, Artificial Sequence
  Description of Artificial Sequence: Synthetic oligonucleotide
agaaguuguuguuuuggau

SEQ ID NO: 472 - RNA, 19 nt, Artificial Sequence
  Description of Artificial Sequence: Synthetic oligonucleotide
gaaguuguuguuuuggaug

SEQ ID NO: 473 - RNA, 19 nt, Artificial Sequence
  Description of Artificial Sequence: Synthetic oligonucleotide
aaguuguuguuuuggauga

SEQ ID NO: 474 - RNA, 19 nt, Artificial Sequence
  Description of Artificial Sequence: Synthetic oligonucleotide
aguuguuguuuuggaugau

SEQ ID NO: 475 - RNA, 19 nt, Artificial Sequence
  Description of Artificial Sequence: Synthetic oligonucleotide
guuguuguuuuggaugauu

SEQ ID NO: 476 - RNA, 19 nt, Artificial Sequence
  Description of Artificial Sequence: Synthetic oligonucleotide
uuguuguuuuggaugauuu

SEQ ID NO: 477 - RNA, 19 nt, Artificial Sequence
  Description of Artificial Sequence: Synthetic oligonucleotide
uuuuauggcugguuaccuu

SEQ ID NO: 478 - RNA, 19 nt, Artificial Sequence
  Description of Artificial Sequence: Synthetic oligonucleotide
uuuauggcugguuaccuug

SEQ ID NO: 479 - RNA, 19 nt, Artificial Sequence
  Description of Artificial Sequence: Synthetic oligonucleotide
uuauggcugguuaccuugg

SEQ ID NO: 480 - RNA, 19 nt, Artificial Sequence
  Description of Artificial Sequence: Synthetic oligonucleotide
uauggcugguuaccuuggg

SEQ ID NO: 481 - RNA, 19 nt, Artificial Sequence
  Description of Artificial Sequence: Synthetic oligonucleotide
auggcugguuaccuuggga

SEQ ID NO: 482 - RNA, 19 nt, Artificial Sequence
  Description of Artificial Sequence: Synthetic oligonucleotide
uggcugguuaccuugggau

SEQ ID NO: 483 - RNA, 19 nt, Artificial Sequence
  Description of Artificial Sequence: Synthetic oligonucleotide
ggcugguuaccuugggaug

SEQ ID NO: 484 - RNA, 19 nt, Artificial Sequence
  Description of Artificial Sequence: Synthetic oligonucleotide
gcugguuaccuugggauga

SEQ ID NO: 485 - RNA, 19 nt, Artificial Sequence
  Description of Artificial Sequence: Synthetic oligonucleotide
cugguuaccuugggaugau

SEQ ID NO: 486 - RNA, 19 nt, Artificial Sequence
  Description of Artificial Sequence: Synthetic oligonucleotide
ugguuaccuugggaugauc

SEQ ID NO: 487 - RNA, 19 nt, Artificial Sequence
  Description of Artificial Sequence: Synthetic oligonucleotide
gguuaccuugggaugaucu

SEQ ID NO: 488 - RNA, 19 nt, Artificial Sequence
  Description of Artificial Sequence: Synthetic oligonucleotide
guuaccuugggaugaucua

SEQ ID NO: 489 - RNA, 19 nt, Artificial Sequence
  Description of Artificial Sequence: Synthetic oligonucleotide
uuaccuugggaugaucuac

SEQ ID NO: 490 - RNA, 19 nt, Artificial Sequence
  Description of Artificial Sequence: Synthetic oligonucleotide
uaccuugggaugaucuacu

SEQ ID NO: 491 - RNA, 19 nt, Artificial Sequence
  Description of Artificial Sequence: Synthetic oligonucleotide
accuugggaugaucuacug

SEQ ID NO: 492 - RNA, 19 nt, Artificial Sequence
  Description of Artificial Sequence: Synthetic oligonucleotide
ccuugggaugaucuacuga

SEQ ID NO: 493 - RNA, 19 nt, Artificial Sequence
  Description of Artificial Sequence: Synthetic oligonucleotide
cuugggaugaucuacugag

SEQ ID NO: 494 - RNA, 19 nt, Artificial Sequence
  Description of Artificial Sequence: Synthetic oligonucleotide
uugggaugaucuacugaga

SEQ ID NO: 495 - RNA, 19 nt, Artificial Sequence
  Description of Artificial Sequence: Synthetic oligonucleotide
ugggaugaucuacugagac

SEQ ID NO: 496 - RNA, 19 nt, Artificial Sequence
  Description of Artificial Sequence: Synthetic oligonucleotide
gggaugaucuacugagacu

SEQ ID NO: 497 - RNA, 19 nt, Artificial Sequence
  Description of Artificial Sequence: Synthetic oligonucleotide
ggaugaucuacugagacug

SEQ ID NO: 498 - RNA, 19 nt, Artificial Sequence
  Description of Artificial Sequence: Synthetic oligonucleotide
gaugaucuacugagacugu

SEQ ID NO: 499 - RNA, 19 nt, Artificial Sequence
  Description of Artificial Sequence: Synthetic oligonucleotide
augaucuacugagacugug

SEQ ID NO: 500 - RNA, 19 nt, Artificial Sequence
  Description of Artificial Sequence: Synthetic oligonucleotide
ugaucuacugagacugugu

SEQ ID NO: 501 - RNA, 19 nt, Artificial Sequence
  Description of Artificial Sequence: Synthetic oligonucleotide
gaucuacugagacugugug

SEQ ID NO: 502 - RNA, 19 nt, Artificial Sequence
  Description of Artificial Sequence: Synthetic oligonucleotide
aucuacugagacuguguga

SEQ ID NO: 503 - RNA, 19 nt, Artificial Sequence
  Description of Artificial Sequence: Synthetic oligonucleotide
ucuacugagacugugugac

SEQ ID NO: 504 - RNA, 19 nt, Artificial Sequence
  Description of Artificial Sequence: Synthetic oligonucleotide
cuacugagacugugugacc

SEQ ID NO: 505 - RNA, 19 nt, Artificial Sequence
  Description of Artificial Sequence: Synthetic oligonucleotide
uacugagacugugugaccg

SEQ ID NO: 506 - RNA, 19 nt, Artificial Sequence
  Description of Artificial Sequence: Synthetic oligonucleotide
acugagacugugugaccgg

SEQ ID NO: 507 - RNA, 19 nt, Artificial Sequence
  Description of Artificial Sequence: Synthetic oligonucleotide
cugagacugugugaccggu

SEQ ID NO: 508 - RNA, 19 nt, Artificial Sequence
  Description of Artificial Sequence: Synthetic oligonucleotide
ugagacugugugaccggua

SEQ ID NO: 509 - RNA, 19 nt, Artificial Sequence
  Description of Artificial Sequence: Synthetic oligonucleotide
gagacugugugaccgguau

SEQ ID NO: 510 - RNA, 19 nt, Artificial Sequence
  Description of Artificial Sequence: Synthetic oligonucleotide
agacugugugaccgguauc

SEQ ID NO: 511 - RNA, 19 nt, Artificial Sequence
  Description of Artificial Sequence: Synthetic oligonucleotide
gacugugugaccgguaucc

SEQ ID NO: 512 - RNA, 19 nt, Artificial Sequence
  Description of Artificial Sequence: Synthetic oligonucleotide
acugugugaccgguaucca

SEQ ID NO: 513 - RNA, 19 nt, Artificial Sequence
  Description of Artificial Sequence: Synthetic oligonucleotide
cugugugaccgguauccau

SEQ ID NO: 514 - RNA, 19 nt, Artificial Sequence
  Description of Artificial Sequence: Synthetic oligonucleotide
ugugugaccgguauccauu

SEQ ID NO: 515 - RNA, 19 nt, Artificial Sequence
  Description of Artificial Sequence: Synthetic oligonucleotide
gugugaccgguauccauug

SEQ ID NO: 516 - RNA, 19 nt, Artificial Sequence
  Description of Artificial Sequence: Synthetic oligonucleotide
ugugaccgguauccauuga

SEQ ID NO: 517 - RNA, 19 nt, Artificial Sequence
  Description of Artificial Sequence: Synthetic oligonucleotide
gugaccgguauccauugac

SEQ ID NO: 518 - RNA, 19 nt, Artificial Sequence
  Description of Artificial Sequence: Synthetic oligonucleotide
ugaccgguauccauugacu

SEQ ID NO: 519 - RNA, 19 nt, Artificial Sequence
  Description of Artificial Sequence: Synthetic oligonucleotide
gaccgguauccauugacug

SEQ ID NO: 520 - RNA, 19 nt, Artificial Sequence
  Description of Artificial Sequence: Synthetic oligonucleotide
accgguauccauugacugu

SEQ ID NO: 521 - RNA, 19 nt, Artificial Sequence
  Description of Artificial Sequence: Synthetic oligonucleotide
ccgguauccauugacugua

SEQ ID NO: 522 - RNA, 19 nt, Artificial Sequence
  Description of Artificial Sequence: Synthetic oligonucleotide
cgguauccauugacuguag

SEQ ID NO: 523 - RNA, 19 nt, Artificial Sequence
  Description of Artificial Sequence: Synthetic oligonucleotide
gguauccauugacuguaga

SEQ ID NO: 524 - RNA, 19 nt, Artificial Sequence
  Description of Artificial Sequence: Synthetic oligonucleotide
guauccauugacuguagag

SEQ ID NO: 525 - RNA, 19 nt, Artificial Sequence
  Description of Artificial Sequence: Synthetic oligonucleotide
uauccauugacuguagaga

SEQ ID NO: 526 - RNA, 19 nt, Artificial Sequence
  Description of Artificial Sequence: Synthetic oligonucleotide
auccauugacuguagagac

SEQ ID NO: 527 - RNA, 19 nt, Artificial Sequence
  Description of Artificial Sequence: Synthetic oligonucleotide
uccauugacuguagagacu

SEQ ID NO: 528 - RNA, 19 nt, Artificial Sequence
  Description of Artificial Sequence: Synthetic oligonucleotide
ccauugacuguagagacua

SEQ ID NO: 529 - RNA, 19 nt, Artificial Sequence
  Description of Artificial Sequence: Synthetic oligonucleotide
cauugacuguagagacuaa

SEQ ID NO: 530 - RNA, 19 nt, Artificial Sequence
  Description of Artificial Sequence: Synthetic oligonucleotide
auugacuguagagacuaaa

SEQ ID NO: 531 - RNA, 19 nt, Artificial Sequence
  Description of Artificial Sequence: Synthetic oligonucleotide
uugacuguagagacuaaag

SEQ ID NO: 532 - RNA, 19 nt, Artificial Sequence
  Description of Artificial Sequence: Synthetic oligonucleotide
ugacuguagagacuaaagg

SEQ ID NO: 533 - RNA, 19 nt, Artificial Sequence
  Description of Artificial Sequence: Synthetic oligonucleotide
gacuguagagacuaaaggg

SEQ ID NO: 534 - RNA, 19 nt, Artificial Sequence
  Description of Artificial Sequence: Synthetic oligonucleotide
acuguagagacuaaagggg

SEQ ID NO: 535 - RNA, 19 nt, Artificial Sequence
  Description of Artificial Sequence: Synthetic oligonucleotide
uuuggcccgcaguauuuug

SEQ ID NO: 536 - RNA, 19 nt, Artificial Sequence
  Description of Artificial Sequence: Synthetic oligonucleotide
uuggcccgcaguauuuuga

SEQ ID NO: 537 - RNA, 19 nt, Artificial Sequence
  Description of Artificial Sequence: Synthetic oligonucleotide
uggcccgcaguauuuugau

SEQ ID NO: 538 - RNA, 19 nt, Artificial Sequence
  Description of Artificial Sequence: Synthetic oligonucleotide
ggcccgcaguauuuugauu

SEQ ID NO: 539 - RNA, 19 nt, Artificial Sequence
  Description of Artificial Sequence: Synthetic oligonucleotide
gcccgcaguauuuugauua

SEQ ID NO: 540 - RNA, 19 nt, Artificial Sequence
  Description of Artificial Sequence: Synthetic oligonucleotide
cccgcaguauuuugauuac

SEQ ID NO: 541 - RNA, 19 nt, Artificial Sequence
  Description of Artificial Sequence: Synthetic oligonucleotide
ccgcaguauuuugauuacc

SEQ ID NO: 542 - RNA, 19 nt, Artificial Sequence
  Description of Artificial Sequence: Synthetic oligonucleotide
cgcaguauuuugauuacca

SEQ ID NO: 543 - RNA, 19 nt, Artificial Sequence
  Description of Artificial Sequence: Synthetic oligonucleotide
gcaguauuuugauuaccag

SEQ ID NO: 544 - RNA, 19 nt, Artificial Sequence
  Description of Artificial Sequence: Synthetic oligonucleotide
caguauuuugauuaccagc

SEQ ID NO: 545 - RNA, 19 nt, Artificial Sequence
  Description of Artificial Sequence: Synthetic oligonucleotide
aguauuuugauuaccagca

SEQ ID NO: 546 - RNA, 19 nt, Artificial Sequence
  Description of Artificial Sequence: Synthetic oligonucleotide
guauuuugauuaccagcaa

SEQ ID NO: 547 - RNA, 19 nt, Artificial Sequence
  Description of Artificial Sequence: Synthetic oligonucleotide
uauuuugauuaccagcaau

SEQ ID NO: 548 - RNA, 19 nt, Artificial Sequence
  Description of Artificial Sequence: Synthetic oligonucleotide
auuuugauuaccagcaauc

SEQ ID NO: 549 - RNA, 19 nt, Artificial Sequence
  Description of Artificial Sequence: Synthetic oligonucleotide
uuuugauuaccagcaauca

SEQ ID NO: 550 - RNA, 19 nt, Artificial Sequence
  Description of Artificial Sequence: Synthetic oligonucleotide
uuugauuaccagcaaucag

SEQ ID NO: 551 - RNA, 19 nt, Artificial Sequence
  Description of Artificial Sequence: Synthetic oligonucleotide
uugauuaccagcaaucagg

SEQ ID NO: 552 - RNA, 19 nt, Artificial Sequence
  Description of Artificial Sequence: Synthetic oligonucleotide
ugauuaccagcaaucaggc

SEQ ID NO: 553 - RNA, 19 nt, Artificial Sequence
  Description of Artificial Sequence: Synthetic oligonucleotide
gauuaccagcaaucaggcc

SEQ ID NO: 554 - RNA, 19 nt, Artificial Sequence
  Description of Artificial Sequence: Synthetic oligonucleotide
auuaccagcaaucaggccc

SEQ ID NO: 555 - RNA, 19 nt, Artificial Sequence
  Description of Artificial Sequence: Synthetic oligonucleotide
uuaccagcaaucaggcccc

SEQ ID NO: 556 - RNA, 19 nt, Artificial Sequence
  Description of Artificial Sequence: Synthetic oligonucleotide
ccccaggaaugguacuccu

SEQ ID NO: 557 - RNA, 19 nt, Artificial Sequence
  Description of Artificial Sequence: Synthetic oligonucleotide
cccaggaaugguacuccuc

SEQ ID NO: 558 - RNA, 19 nt, Artificial Sequence
  Description of Artificial Sequence: Synthetic oligonucleotide
ccaggaaugguacuccuca

SEQ ID NO: 559 - RNA, 19 nt, Artificial Sequence
  Description of Artificial Sequence: Synthetic oligonucleotide
caggaaugguacuccucaa

SEQ ID NO: 560 - RNA, 19 nt, Artificial Sequence
  Description of Artificial Sequence: Synthetic oligonucleotide
aggaaugguacuccucaac

SEQ ID NO: 561 - RNA, 19 nt, Artificial Sequence
  Description of Artificial Sequence: Synthetic oligonucleotide
ggaaugguacuccucaacu

SEQ ID NO: 562 - RNA, 19 nt, Artificial Sequence
  Description of Artificial Sequence: Synthetic oligonucleotide
gaaugguacuccucaacug

SEQ ID NO: 563 - RNA, 19 nt, Artificial Sequence
  Description of Artificial Sequence: Synthetic oligonucleotide
aaugguacuccucaacugc

SEQ ID NO: 564 - RNA, 19 nt, Artificial Sequence
  Description of Artificial Sequence: Synthetic oligonucleotide
augguacuccucaacugcu

SEQ ID NO: 565 - RNA, 19 nt, Artificial Sequence
  Description of Artificial Sequence: Synthetic oligonucleotide
ugguacuccucaacugcug

SEQ ID NO: 566 - RNA, 19 nt, Artificial Sequence
  Description of Artificial Sequence: Synthetic oligonucleotide
gguacuccucaacugcugu

SEQ ID NO: 567 - RNA, 19 nt, Artificial Sequence
  Description of Artificial Sequence: Synthetic oligonucleotide
guacuccucaacugcuguc

SEQ ID NO: 568 - RNA, 19 nt, Artificial Sequence
  Description of Artificial Sequence: Synthetic oligonucleotide
uacuccucaacugcugucc

SEQ ID NO: 569 - RNA, 19 nt, Artificial Sequence
  Description of Artificial Sequence: Synthetic oligonucleotide
acuccucaacugcuguccc

SEQ ID NO: 570 - RNA, 19 nt, Artificial Sequence
  Description of Artificial Sequence: Synthetic oligonucleotide
cuccucaacugcuguccca

SEQ ID NO: 571 - RNA, 19 nt, Artificial Sequence
  Description of Artificial Sequence: Synthetic oligonucleotide
uccucaacugcugucccag

SEQ ID NO: 572 - RNA, 19 nt, Artificial Sequence
  Description of Artificial Sequence: Synthetic oligonucleotide
cucaacugcugucccagcu

SEQ ID NO: 573 - RNA, 19 nt, Artificial Sequence
  Description of Artificial Sequence: Synthetic oligonucleotide
ucaacugcugucccagcug

SEQ ID NO: 574 - RNA, 19 nt, Artificial Sequence
  Description of Artificial Sequence: Synthetic oligonucleotide
caacugcugucccagcugu

SEQ ID NO: 575 - RNA, 19 nt, Artificial Sequence
  Description of Artificial Sequence: Synthetic oligonucleotide
aacugcugucccagcugua

SEQ ID NO: 576 - RNA, 19 nt, Artificial Sequence
  Description of Artificial Sequence: Synthetic oligonucleotide
acugcugucccagcuguag

SEQ ID NO: 577 - RNA, 19 nt, Artificial Sequence
  Description of Artificial Sequence: Synthetic oligonucleotide
cugcugucccagcuguaga

SEQ ID NO: 578 - RNA, 19 nt, Artificial Sequence
  Description of Artificial Sequence: Synthetic oligonucleotide
ugcugucccagcuguagaa

SEQ ID NO: 579 - RNA, 19 nt, Artificial Sequence
  Description of Artificial Sequence: Synthetic oligonucleotide
gcugucccagcuguagaag

SEQ ID NO: 580 - RNA, 19 nt, Artificial Sequence
  Description of Artificial Sequence: Synthetic oligonucleotide
cugucccagcuguagaagc

SEQ ID NO: 581 - RNA, 19 nt, Artificial Sequence
  Description of Artificial Sequence: Synthetic oligonucleotide
ugucccagcuguagaagcu

SEQ ID NO: 582 - RNA, 19 nt, Artificial Sequence
  Description of Artificial Sequence: Synthetic oligonucleotide
gucccagcuguagaagcuc

SEQ ID NO: 583 - RNA, 19 nt, Artificial Sequence
  Description of Artificial Sequence: Synthetic oligonucleotide
ucccagcuguagaagcucu

SEQ ID NO: 584 - RNA, 19 nt, Artificial Sequence
  Description of Artificial Sequence: Synthetic oligonucleotide
cccagcuguagaagcucuc

SEQ ID NO: 585 - RNA, 19 nt, Artificial Sequence
  Description of Artificial Sequence: Synthetic oligonucleotide
ccagcuguagaagcucucu

SEQ ID NO: 586 - RNA, 19 nt, Artificial Sequence
  Description of Artificial Sequence: Synthetic oligonucleotide
cagcuguagaagcucucua

SEQ ID NO: 587 - RNA, 19 nt, Artificial Sequence
  Description of Artificial Sequence: Synthetic oligonucleotide
agcuguagaagcucucuau

SEQ ID NO: 588 - RNA, 19 nt, Artificial Sequence
  Description of Artificial Sequence: Synthetic oligonucleotide
gcuguagaagcucucuauc

SEQ ID NO: 589 - RNA, 19 nt, Artificial Sequence
  Description of Artificial Sequence: Synthetic oligonucleotide
cuguagaagcucucuaucg

SEQ ID NO: 590 - RNA, 19 nt, Artificial Sequence
  Description of Artificial Sequence: Synthetic oligonucleotide
uguagaagcucucuaucgg

SEQ ID NO: 591 - RNA, 19 nt, Artificial Sequence
  Description of Artificial Sequence: Synthetic oligonucleotide
guagaagcucucuaucgga

SEQ ID NO: 592 - RNA, 19 nt, Artificial Sequence
  Description of Artificial Sequence: Synthetic oligonucleotide
uagaagcucucuaucggag

SEQ ID NO: 593 - RNA, 19 nt, Artificial Sequence
  Description of Artificial Sequence: Synthetic oligonucleotide
agaagcucucuaucggagg

SEQ ID NO: 594 - RNA, 19 nt, Artificial Sequence
  Description of Artificial Sequence: Synthetic oligonucleotide
gaagcucucuaucggagga

SEQ ID NO: 595 - RNA, 19 nt, Artificial Sequence
  Description of Artificial Sequence: Synthetic oligonucleotide
aagcucucuaucggaggau

SEQ ID NO: 596 - RNA, 19 nt, Artificial Sequence
  Description of Artificial Sequence: Synthetic oligonucleotide
agcucucuaucggaggauu

SEQ ID NO: 597 - RNA, 19 nt, Artificial Sequence
  Description of Artificial Sequence: Synthetic oligonucleotide
gcucucuaucggaggauua

SEQ ID NO: 598 - RNA, 19 nt, Artificial Sequence
  Description of Artificial Sequence: Synthetic oligonucleotide
cucucuaucggaggauuac

SEQ ID NO: 599 - RNA, 19 nt, Artificial Sequence
  Description of Artificial Sequence: Synthetic oligonucleotide
ucucuaucggaggauuacu

SEQ ID NO: 600 - RNA, 19 nt, Artificial Sequence
  Description of Artificial Sequence: Synthetic oligonucleotide
cucuaucggaggauuacua

SEQ ID NO: 601 - RNA, 19 nt, Artificial Sequence
  Description of Artificial Sequence: Synthetic oligonucleotide
ucuaucggaggauuacuac

SEQ ID NO: 602 - RNA, 19 nt, Artificial Sequence
  Description of Artificial Sequence: Synthetic oligonucleotide
cuaucggaggauuacuacu

SEQ ID NO: 603 - RNA, 19 nt, Artificial Sequence
  Description of Artificial Sequence: Synthetic oligonucleotide
uaucggaggauuacuacuu

SEQ ID NO: 604 - RNA, 19 nt, Artificial Sequence
  Description of Artificial Sequence: Synthetic oligonucleotide
aucggaggauuacuacuuu

SEQ ID NO: 605 - RNA, 19 nt, Artificial Sequence
  Description of Artificial Sequence: Synthetic oligonucleotide
ucggaggauuacuacuuug

SEQ ID NO: 606 - RNA, 19 nt, Artificial Sequence
  Description of Artificial Sequence: Synthetic oligonucleotide
cggaggauuacuacuuugc

SEQ ID NO: 607 - RNA, 19 nt, Artificial Sequence
  Description of Artificial Sequence: Synthetic oligonucleotide
ggaggauuacuacuuugca

SEQ ID NO: 608 - RNA, 19 nt, Artificial Sequence
  Description of Artificial Sequence: Synthetic oligonucleotide
gaggauuacuacuuugcaa

SEQ ID NO: 609 - RNA, 19 nt, Artificial Sequence
  Description of Artificial Sequence: Synthetic oligonucleotide
aggauuacuacuuugcaau

SEQ ID NO: 610 - RNA, 19 nt, Artificial Sequence
  Description of Artificial Sequence: Synthetic oligonucleotide
ggauuacuacuuugcaauu

SEQ ID NO: 611 - RNA, 19 nt, Artificial Sequence
  Description of Artificial Sequence: Synthetic oligonucleotide
gauuacuacuuugcaauuu

SEQ ID NO: 612 - RNA, 19 nt, Artificial Sequence
  Description of Artificial Sequence: Synthetic oligonucleotide
auuacuacuuugcaauuuu

SEQ ID NO: 613 - RNA, 19 nt, Artificial Sequence
  Description of Artificial Sequence: Synthetic oligonucleotide
uuacuacuuugcaauuuug

SEQ ID NO: 614 - RNA, 19 nt, Artificial Sequence
  Description of Artificial Sequence: Synthetic oligonucleotide
uacuacuuugcaauuuugg

SEQ ID NO: 615 - RNA, 19 nt, Artificial Sequence
  Description of Artificial Sequence: Synthetic oligonucleotide
acuacuuugcaauuuugga

SEQ ID NO: 616 - RNA, 19 nt, Artificial Sequence
  Description of Artificial Sequence: Synthetic oligonucleotide
cuacuuugcaauuuuggaa

SEQ ID NO: 617 - RNA, 19 nt, Artificial Sequence
  Description of Artificial Sequence: Synthetic oligonucleotide
uacuuugcaauuuuggaag

SEQ ID NO: 618 - RNA, 19 nt, Artificial Sequence
  Description of Artificial Sequence: Synthetic oligonucleotide
acuuugcaauuuuggaaga

SEQ ID NO: 619 - RNA, 19 nt, Artificial Sequence
  Description of Artificial Sequence: Synthetic oligonucleotide
cuuugcaauuuuggaagac

SEQ ID NO: 620 - RNA, 19 nt, Artificial Sequence
  Description of Artificial Sequence: Synthetic oligonucleotide
uuugcaauuuuggaagacu

SEQ ID NO: 621 - RNA, 19 nt, Artificial Sequence
  Description of Artificial Sequence: Synthetic oligonucleotide
uugcaauuuuggaagacug

SEQ ID NO: 622 - RNA, 19 nt, Artificial Sequence
  Description of Artificial Sequence: Synthetic oligonucleotide
ugcaauuuuggaagacugc

SEQ ID NO: 623 - RNA, 19 nt, Artificial Sequence
  Description of Artificial Sequence: Synthetic oligonucleotide
gcaauuuuggaagacugcu

SEQ ID NO: 624 - RNA, 19 nt, Artificial Sequence
  Description of Artificial Sequence: Synthetic oligonucleotide
caauuuuggaagacugcug

SEQ ID NO: 625 - RNA, 19 nt, Artificial Sequence
  Description of Artificial Sequence: Synthetic oligonucleotide
aauuuuggaagacugcugg

SEQ ID NO: 626 - RNA, 19 nt, Artificial Sequence
  Description of Artificial Sequence: Synthetic oligonucleotide
auuuuggaagacugcugga

SEQ ID NO: 627 - RNA, 19 nt, Artificial Sequence
  Description of Artificial Sequence: Synthetic oligonucleotide
uuuuggaagacugcuggag

SEQ ID NO: 628 - RNA, 19 nt, Artificial Sequence
  Description of Artificial Sequence: Synthetic oligonucleotide
uuuggaagacugcuggaga

SEQ ID NO: 629 - RNA, 19 nt, Artificial Sequence
  Description of Artificial Sequence: Synthetic oligonucleotide
uuggaagacugcuggagaa

SEQ ID NO: 630 - RNA, 19 nt, Artificial Sequence
  Description of Artificial Sequence: Synthetic oligonucleotide
uggaagacugcuggagaac

SEQ ID NO: 631 - RNA, 19 nt, Artificial Sequence
  Description of Artificial Sequence: Synthetic oligonucleotide
ggaagacugcuggagaaca

SEQ ID NO: 632 - RNA, 19 nt, Artificial Sequence
  Description of Artificial Sequence: Synthetic oligonucleotide
gaagacugcuggagaacaa

SEQ ID NO: 633 - RNA, 19 nt, Artificial Sequence
  Description of Artificial Sequence: Synthetic oligonucleotide
aagacugcuggagaacaau

SEQ ID NO: 634 - RNA, 19 nt, Artificial Sequence
  Description of Artificial Sequence: Synthetic oligonucleotide
agacugcuggagaacaauc

SEQ ID NO: 635 - RNA, 19 nt, Artificial Sequence
  Description of Artificial Sequence: Synthetic oligonucleotide
gacugcuggagaacaaucc

SEQ ID NO: 636 - RNA, 19 nt, Artificial Sequence
  Description of Artificial Sequence: Synthetic oligonucleotide
acugcuggagaacaaucca

SEQ ID NO: 637 - RNA, 19 nt, Artificial Sequence
  Description of Artificial Sequence: Synthetic oligonucleotide
cugcuggagaacaauccac

SEQ ID NO: 638 - RNA, 19 nt, Artificial Sequence
  Description of Artificial Sequence: Synthetic oligonucleotide
ugcuggagaacaauccacg

SEQ ID NO: 639 - RNA, 19 nt, Artificial Sequence
  Description of Artificial Sequence: Synthetic oligonucleotide
gcuggagaacaauccacgg

SEQ ID NO: 640 - RNA, 19 nt, Artificial Sequence
  Description of Artificial Sequence: Synthetic oligonucleotide
cuggagaacaauccacgga

SEQ ID NO: 641 - RNA, 19 nt, Artificial Sequence
  Description of Artificial Sequence: Synthetic oligonucleotide
uggagaacaauccacggag

SEQ ID NO: 642 - RNA, 19 nt, Artificial Sequence
  Description of Artificial Sequence: Synthetic oligonucleotide
ggagaacaauccacggagg

SEQ ID NO: 643 - RNA, 19 nt, Artificial Sequence
  Description of Artificial Sequence: Synthetic oligonucleotide
gagaacaauccacggaggu

SEQ ID NO: 644 - RNA, 19 nt, Artificial Sequence
  Description of Artificial Sequence: Synthetic oligonucleotide
agaacaauccacggaggua

SEQ ID NO: 645 - RNA, 19 nt, Artificial Sequence
  Description of Artificial Sequence: Synthetic oligonucleotide
gaacaauccacggagguac

SEQ ID NO: 646 - RNA, 19 nt, Artificial Sequence
  Description of Artificial Sequence: Synthetic oligonucleotide
aacaauccacggagguacc

SEQ ID NO: 647 - RNA, 19 nt, Artificial Sequence
  Description of Artificial Sequence: Synthetic oligonucleotide
acaauccacggagguaccc

SEQ ID NO: 648 - RNA, 19 nt, Artificial Sequence
  Description of Artificial Sequence: Synthetic oligonucleotide
aauccacggagguacccga

SEQ ID NO: 649 - RNA, 19 nt, Artificial Sequence
  Description of Artificial Sequence: Synthetic oligonucleotide
auccacggagguacccgaa

SEQ ID NO: 650 - RNA, 19 nt, Artificial Sequence
  Description of Artificial Sequence: Synthetic oligonucleotide
agguacccgaaggccgauu

SEQ ID NO: 651 - RNA, 19 nt, Artificial Sequence
  Description of Artificial Sequence: Synthetic oligonucleotide
guacccgaaggccgauuug

SEQ ID NO: 652 - RNA, 19 nt, Artificial Sequence
  Description of Artificial Sequence: Synthetic oligonucleotide
uacccgaaggccgauuuga

SEQ ID NO: 653 - RNA, 19 nt, Artificial Sequence
  Description of Artificial Sequence: Synthetic oligonucleotide
acccgaaggccgauuugaa

SEQ ID NO: 654 - RNA, 19 nt, Artificial Sequence
  Description of Artificial Sequence: Synthetic oligonucleotide
cccgaaggccgauuugaag

SEQ ID NO: 655 - RNA, 19 nt, Artificial Sequence
  Description of Artificial Sequence: Synthetic oligonucleotide
ccgaaggccgauuugaagc

SEQ ID NO: 656 - RNA, 19 nt, Artificial Sequence
  Description of Artificial Sequence: Synthetic oligonucleotide
cgaaggccgauuugaagca

SEQ ID NO: 657 - RNA, 19 nt, Artificial Sequence
  Description of Artificial Sequence: Synthetic oligonucleotide
gaaggccgauuugaagcag

SEQ ID NO: 658 - RNA, 19 nt, Artificial Sequence
  Description of Artificial Sequence: Synthetic oligonucleotide
aaggccgauuugaagcagu

SEQ ID NO: 659 - RNA, 19 nt, Artificial Sequence
  Description of Artificial Sequence: Synthetic oligonucleotide
aggccgauuugaagcagug

SEQ ID NO: 660 - RNA, 19 nt, Artificial Sequence
  Description of Artificial Sequence: Synthetic oligonucleotide
ggccgauuugaagcagugg

SEQ ID NO: 661 - RNA, 19 nt, Artificial Sequence
  Description of Artificial Sequence: Synthetic oligonucleotide
gccgauuugaagcagugga

SEQ ID NO: 662 - RNA, 19 nt, Artificial Sequence
  Description of Artificial Sequence: Synthetic oligonucleotide
ccgauuugaagcaguggac

SEQ ID NO: 663 - RNA, 19 nt, Artificial Sequence
  Description of Artificial Sequence: Synthetic oligonucleotide
cgauuugaagcaguggacc

SEQ ID NO: 664 - RNA, 19 nt, Artificial Sequence
  Description of Artificial Sequence: Synthetic oligonucleotide
gauuugaagcaguggaccc

SEQ ID NO: 665 - RNA, 19 nt, Artificial Sequence
  Description of Artificial Sequence: Synthetic oligonucleotide
auuugaagcaguggaccca

SEQ ID NO: 666 - RNA, 19 nt, Artificial Sequence
  Description of Artificial Sequence: Synthetic oligonucleotide
uuugaagcaguggacccac

SEQ ID NO: 667 - RNA, 19 nt, Artificial Sequence
  Description of Artificial Sequence: Synthetic oligonucleotide
uugaagcaguggacccacc

SEQ ID NO: 668 - RNA, 19 nt, Artificial Sequence
  Description of Artificial Sequence: Synthetic oligonucleotide
acccacccugugcccuuuu

SEQ ID NO: 669 - RNA, 19 nt, Artificial Sequence
  Description of Artificial Sequence: Synthetic oligonucleotide
acccugugcccuuuuccca

SEQ ID NO: 670 - RNA, 19 nt, Artificial Sequence
  Description of Artificial Sequence: Synthetic oligonucleotide
cccugugcccuuuucccau

SEQ ID NO: 671 - RNA, 19 nt, Artificial Sequence
  Description of Artificial Sequence: Synthetic oligonucleotide
ccugugcccuuuucccaua

SEQ ID NO: 672 - RNA, 19 nt, Artificial Sequence
  Description of Artificial Sequence: Synthetic oligonucleotide
cugugcccuuuucccauau

SEQ ID NO: 673 - RNA, 19 nt, Artificial Sequence
  Description of Artificial Sequence: Synthetic oligonucleotide
ugugcccuuuucccauaua

SEQ ID NO: 674 - RNA, 19 nt, Artificial Sequence
  Description of Artificial Sequence: Synthetic oligonucleotide
gugcccuuuucccauauaa

SEQ ID NO: 675 - RNA, 19 nt, Artificial Sequence
  Description of Artificial Sequence: Synthetic oligonucleotide
ugcccuuuucccauauaaa

SEQ ID NO: 676 - RNA, 19 nt, Artificial Sequence
  Description of Artificial Sequence: Synthetic oligonucleotide
cccauauaaaauaaauuac

SEQ ID NO: 677 - RNA, 19 nt, Artificial Sequence
  Description of Artificial Sequence: Synthetic oligonucleotide
guacccgaaggccgauuug

SEQ ID NO: 678 - RNA, 19 nt, Artificial Sequence
  Description of Artificial Sequence: Synthetic oligonucleotide
cgcuuuucuugcuuggcau

SEQ ID NO: 679 - RNA, 19 nt, Artificial Sequence
  Description of Artificial Sequence: Synthetic oligonucleotide
ccgcuuuucuugcuuggca

SEQ ID NO: 680 - RNA, 19 nt, Artificial Sequence
  Description of Artificial Sequence: Synthetic oligonucleotide
gccgcuuuucuugcuuggc

SEQ ID NO: 681 - RNA, 19 nt, Artificial Sequence
  Description of Artificial Sequence: Synthetic oligonucleotide
ggccgcuuuucuugcuugg

SEQ ID NO: 682 - RNA, 19 nt, Artificial Sequence
  Description of Artificial Sequence: Synthetic oligonucleotide
gggccgcuuuucuugcuug

SEQ ID NO: 683 - RNA, 19 nt, Artificial Sequence
  Description of Artificial Sequence: Synthetic oligonucleotide
cgggccgcuuuucuugcuu

SEQ ID NO: 684 - RNA, 19 nt, Artificial Sequence
  Description of Artificial Sequence: Synthetic oligonucleotide
uugcgggccgcuuuucuug

SEQ ID NO: 685 - RNA, 19 nt, Artificial Sequence
  Description of Artificial Sequence: Synthetic oligonucleotide
guugcgggccgcuuuucuu

SEQ ID NO: 686 - RNA, 19 nt, Artificial Sequence
  Description of Artificial Sequence: Synthetic oligonucleotide
accucuuaugggguugcgg

SEQ ID NO: 687 - RNA, 19 nt, Artificial Sequence
  Description of Artificial Sequence: Synthetic oligonucleotide
caccucuuaugggguugcg

SEQ ID NO: 688 - RNA, 19 nt, Artificial Sequence
  Description of Artificial Sequence: Synthetic oligonucleotide
ccaccucuuaugggguugc

SEQ ID NO: 689 - RNA, 19 nt, Artificial Sequence
  Description of Artificial Sequence: Synthetic oligonucleotide
cccaccucuuaugggguug

SEQ ID NO: 690 - RNA, 19 nt, Artificial Sequence
  Description of Artificial Sequence: Synthetic oligonucleotide
acccaccucuuaugggguu

SEQ ID NO: 691 - RNA, 19 nt, Artificial Sequence
  Description of Artificial Sequence: Synthetic oligonucleotide
cacccaccucuuauggggu

SEQ ID NO: 692 - RNA, 19 nt, Artificial Sequence
  Description of Artificial Sequence: Synthetic oligonucleotide
acacccaccucuuaugggg

SEQ ID NO: 693 - RNA, 19 nt, Artificial Sequence
  Description of Artificial Sequence: Synthetic oligonucleotide
aacacccaccucuuauggg

SEQ ID NO: 694 - RNA, 19 nt, Artificial Sequence
  Description of Artificial Sequence: Synthetic oligonucleotide
gaacacccaccucuuaugg

SEQ ID NO: 695 - RNA, 19 nt, Artificial Sequence
  Description of Artificial Sequence: Synthetic oligonucleotide
ugaacacccaccucuuaug

SEQ ID NO: 696 - RNA, 19 nt, Artificial Sequence
  Description of Artificial Sequence: Synthetic oligonucleotide
gugaacacccaccucuuau

SEQ ID NO: 697 - RNA, 19 nt, Artificial Sequence
  Description of Artificial Sequence: Synthetic oligonucleotide
ggugaacacccaccucuua

SEQ ID NO: 698 - RNA, 19 nt, Artificial Sequence
  Description of Artificial Sequence: Synthetic oligonucleotide
gggugaacacccaccucuu

SEQ ID NO: 699 - RNA, 19 nt, Artificial Sequence
  Description of Artificial Sequence: Synthetic oligonucleotide
agggugaacacccaccucu

SEQ ID NO: 700 - RNA, 19 nt, Artificial Sequence
  Description of Artificial Sequence: Synthetic oligonucleotide
aagggugaacacccaccuc

SEQ ID NO: 701 - RNA, 19 nt, Artificial Sequence
  Description of Artificial Sequence: Synthetic oligonucleotide
uaagggugaacacccaccu

SEQ ID NO: 702 - RNA, 19 nt, Artificial Sequence
  Description of Artificial Sequence: Synthetic oligonucleotide
uuaagggugaacacccacc

SEQ ID NO: 703 - RNA, 19 nt, Artificial Sequence
  Description of Artificial Sequence: Synthetic oligonucleotide
auuaagggugaacacccac

SEQ ID NO: 704 - RNA, 19 nt, Artificial Sequence
  Description of Artificial Sequence: Synthetic oligonucleotide
uauuaagggugaacaccca

SEQ ID NO: 705 - RNA, 19 nt, Artificial Sequence
  Description of Artificial Sequence: Synthetic oligonucleotide
uuauuaagggugaacaccc

SEQ ID NO: 706 - RNA, 19 nt, Artificial Sequence
  Description of Artificial Sequence: Synthetic oligonucleotide
auuauuaagggugaacacc

SEQ ID NO: 707 - RNA, 19 nt, Artificial Sequence
  Description of Artificial Sequence: Synthetic oligonucleotide
gauuauuaagggugaacac

SEQ ID NO: 708 - RNA, 19 nt, Artificial Sequence
  Description of Artificial Sequence: Synthetic oligonucleotide
ggauuauuaagggugaaca

SEQ ID NO: 709 - RNA, 19 nt, Artificial Sequence
  Description of Artificial Sequence: Synthetic oligonucleotide
aggauuauuaagggugaac

SEQ ID NO: 710 - RNA, 19 nt, Artificial Sequence
  Description of Artificial Sequence: Synthetic oligonucleotide
aaggauuauuaagggugaa

SEQ ID NO: 711 - RNA, 19 nt, Artificial Sequence
  Description of Artificial Sequence: Synthetic oligonucleotide
gaaggauuauuaaggguga

SEQ ID NO: 712 - RNA, 19 nt, Artificial Sequence
  Description of Artificial Sequence: Synthetic oligonucleotide
ggaaggauuauuaagggug

SEQ ID NO: 713 - RNA, 19 nt, Artificial Sequence
  Description of Artificial Sequence: Synthetic oligonucleotide
cggaaggauuauuaagggu

SEQ ID NO: 714 - RNA, 19 nt, Artificial Sequence
  Description of Artificial Sequence: Synthetic oligonucleotide
ucggaaggauuauuaaggg

SEQ ID NO: 715 - RNA, 19 nt, Artificial Sequence
  Description of Artificial Sequence: Synthetic oligonucleotide
cucggaaggauuauuaagg

SEQ ID NO: 716 - RNA, 19 nt, Artificial Sequence
  Description of Artificial Sequence: Synthetic oligonucleotide
ccucggaaggauuauuaag

SEQ ID NO: 717 - RNA, 19 nt, Artificial Sequence
  Description of Artificial Sequence: Synthetic oligonucleotide
uccucggaaggauuauuaa

SEQ ID NO: 718 - RNA, 19 nt, Artificial Sequence
  Description of Artificial Sequence: Synthetic oligonucleotide
cuccucggaaggauuauua

SEQ ID NO: 719 - RNA, 19 nt, Artificial Sequence
  Description of Artificial Sequence: Synthetic oligonucleotide
ccuccucggaaggauuauu

SEQ ID NO: 720 - RNA, 19 nt, Artificial Sequence
  Description of Artificial Sequence: Synthetic oligonucleotide
uccuccucggaaggauuau

SEQ ID NO: 721 - RNA, 19 nt, Artificial Sequence
  Description of Artificial Sequence: Synthetic oligonucleotide
cuccuccucggaaggauua

SEQ ID NO: 722 - RNA, 19 nt, Artificial Sequence
  Description of Artificial Sequence: Synthetic oligonucleotide
ucuccuccucggaaggauu

SEQ ID NO: 723 - RNA, 19 nt, Artificial Sequence
  Description of Artificial Sequence: Synthetic oligonucleotide
uucuccuccucggaaggau

SEQ ID NO: 724 - RNA, 19 nt, Artificial Sequence
  Description of Artificial Sequence: Synthetic oligonucleotide
uuucuccuccucggaagga

SEQ ID NO: 725 - RNA, 19 nt, Artificial Sequence
  Description of Artificial Sequence: Synthetic oligonucleotide
uuuucuccuccucggaagg

SEQ ID NO: 726 - RNA, 19 nt, Artificial Sequence
  Description of Artificial Sequence: Synthetic oligonucleotide
aagcucccguauuuuguuu

SEQ ID NO: 727 - RNA, 19 nt, Artificial Sequence
  Description of Artificial Sequence: Synthetic oligonucleotide
gaagcucccguauuuuguu

SEQ ID NO: 728 - RNA, 19 nt, Artificial Sequence
  Description of Artificial Sequence: Synthetic oligonucleotide
ggaagcucccguauuuugu

SEQ ID NO: 729 - RNA, 19 nt, Artificial Sequence
  Description of Artificial Sequence: Synthetic oligonucleotide
uggaagcucccguauuuug

SEQ ID NO: 730 - RNA, 19 nt, Artificial Sequence
  Description of Artificial Sequence: Synthetic oligonucleotide
uuggaagcucccguauuuu

SEQ ID NO: 731 - RNA, 19 nt, Artificial Sequence
  Description of Artificial Sequence: Synthetic oligonucleotide
auuggaagcucccguauuu

SEQ ID NO: 732 - RNA, 19 nt, Artificial Sequence
  Description of Artificial Sequence: Synthetic oligonucleotide
gauuggaagcucccguauu

SEQ ID NO: 733 - RNA, 19 nt, Artificial Sequence
  Description of Artificial Sequence: Synthetic oligonucleotide
agauuggaagcucccguau

SEQ ID NO: 734 - RNA, 19 nt, Artificial Sequence
  Description of Artificial Sequence: Synthetic oligonucleotide
gagauuggaagcucccgua

SEQ ID NO: 735 - RNA, 19 nt, Artificial Sequence
  Description of Artificial Sequence: Synthetic oligonucleotide
ggagauuggaagcucccgu

SEQ ID NO: 736 - RNA, 19 nt, Artificial Sequence
  Description of Artificial Sequence: Synthetic oligonucleotide
agggagauuggaagcuccc

SEQ ID NO: 737 - RNA, 19 nt, Artificial Sequence
  Description of Artificial Sequence: Synthetic oligonucleotide
aagggagauuggaagcucc

SEQ ID NO: 738 - RNA, 19 nt, Artificial Sequence
  Description of Artificial Sequence: Synthetic oligonucleotide
aaagggagauuggaagcuc

SEQ ID NO: 739 - RNA, 19 nt, Artificial Sequence
  Description of Artificial Sequence: Synthetic oligonucleotide
aaaagggagauuggaagcu

SEQ ID NO: 740 - RNA, 19 nt, Artificial Sequence
  Description of Artificial Sequence: Synthetic oligonucleotide
cgcaaacaaaauaaucaaa

SEQ ID NO: 741 - RNA, 19 nt, Artificial Sequence
  Description of Artificial Sequence: Synthetic oligonucleotide
ccgcaaacaaaauaaucaa

SEQ ID NO: 742 - RNA, 19 nt, Artificial Sequence
  Description of Artificial Sequence: Synthetic oligonucleotide
uccgcaaacaaaauaauca

SEQ ID NO: 743 - RNA, 19 nt, Artificial Sequence
  Description of Artificial Sequence: Synthetic oligonucleotide
cuccgcaaacaaaauaauc

SEQ ID NO: 744 - RNA, 19 nt, Artificial Sequence
  Description of Artificial Sequence: Synthetic oligonucleotide
ucuccgcaaacaaaauaau

SEQ ID NO: 745 - RNA, 19 nt, Artificial Sequence
  Description of Artificial Sequence: Synthetic oligonucleotide
cucuccgcaaacaaaauaa

SEQ ID NO: 746 - RNA, 19 nt, Artificial Sequence
  Description of Artificial Sequence: Synthetic oligonucleotide
ccucuccgcaaacaaaaua

SEQ ID NO: 747 - RNA, 19 nt, Artificial Sequence
  Description of Artificial Sequence: Synthetic oligonucleotide
uccucuccgcaaacaaaau

SEQ ID NO: 748 - RNA, 19 nt, Artificial Sequence
  Description of Artificial Sequence: Synthetic oligonucleotide
uuccucuccgcaaacaaaa

SEQ ID NO: 749 - RNA, 19 nt, Artificial Sequence
  Description of Artificial Sequence: Synthetic oligonucleotide
cuuccucuccgcaaacaaa

SEQ ID NO: 750 - RNA, 19 nt, Artificial Sequence
  Description of Artificial Sequence: Synthetic oligonucleotide
ccuuccucuccgcaaacaa

SEQ ID NO: 751 - RNA, 19 nt, Artificial Sequence
  Description of Artificial Sequence: Synthetic oligonucleotide
accuuccucuccgcaaaca

SEQ ID NO: 752 - RNA, 19 nt, Artificial Sequence
  Description of Artificial Sequence: Synthetic oligonucleotide
aaccuuccucuccgcaaac

SEQ ID NO: 753 - RNA, 19 nt, Artificial Sequence
  Description of Artificial Sequence: Synthetic oligonucleotide
aaaccuuccucuccgcaaa

SEQ ID NO: 754 - RNA, 19 nt, Artificial Sequence
  Description of Artificial Sequence: Synthetic oligonucleotide
caaaccuuccucuccgcaa

SEQ ID NO: 755 - RNA, 19 nt, Artificial Sequence
  Description of Artificial Sequence: Synthetic oligonucleotide
ccaaaccuuccucuccgca

SEQ ID NO: 756 - RNA, 19 nt, Artificial Sequence
  Description of Artificial Sequence: Synthetic oligonucleotide
uccaaaccuuccucuccgc

SEQ ID NO: 757 - RNA, 19 nt, Artificial Sequence
  Description of Artificial Sequence: Synthetic oligonucleotide
uuccaaaccuuccucuccg

SEQ ID NO: 758 - RNA, 19 nt, Artificial Sequence
  Description of Artificial Sequence: Synthetic oligonucleotide
cuuccaaaccuuccucucc

SEQ ID NO: 759 - RNA, 19 nt, Artificial Sequence
  Description of Artificial Sequence: Synthetic oligonucleotide
ucuuccaaaccuuccucuc

SEQ ID NO: 760 - RNA, 19 nt, Artificial Sequence
  Description of Artificial Sequence: Synthetic oligonucleotide
cucuuccaaaccuuccucu

SEQ ID NO: 761 - RNA, 19 nt, Artificial Sequence
  Description of Artificial Sequence: Synthetic oligonucleotide
ccucuuccaaaccuuccuc

SEQ ID NO: 762 - RNA, 19 nt, Artificial Sequence
  Description of Artificial Sequence: Synthetic oligonucleotide
cccucuuccaaaccuuccu

SEQ ID NO: 763 - RNA, 19 nt, Artificial Sequence
  Description of Artificial Sequence: Synthetic oligonucleotide
acccucuuccaaaccuucc

SEQ ID NO: 764 - RNA, 19 nt, Artificial Sequence
  Description of Artificial Sequence: Synthetic oligonucleotide
uacccucuuccaaaccuuc

SEQ ID NO: 765 - RNA, 19 nt, Artificial Sequence
  Description of Artificial Sequence: Synthetic oligonucleotide
cuacccucuuccaaaccuu

SEQ ID NO: 766 - RNA, 19 nt, Artificial Sequence
  Description of Artificial Sequence: Synthetic oligonucleotide
ucuacccucuuccaaaccu

SEQ ID NO: 767 - RNA, 19 nt, Artificial Sequence
  Description of Artificial Sequence: Synthetic oligonucleotide
uucuacccucuuccaaacc

SEQ ID NO: 768 - RNA, 19 nt, Artificial Sequence
  Description of Artificial Sequence: Synthetic oligonucleotide
guucuacccucuuccaaac

SEQ ID NO: 769 - RNA, 19 nt, Artificial Sequence
  Description of Artificial Sequence: Synthetic oligonucleotide
aguucuacccucuuccaaa

SEQ ID NO: 770 - RNA, 19 nt, Artificial Sequence
  Description of Artificial Sequence: Synthetic oligonucleotide
gaguucuacccucuuccaa

SEQ ID NO: 771 - RNA, 19 nt, Artificial Sequence
  Description of Artificial Sequence: Synthetic oligonucleotide
ggaguucuacccucuucca

SEQ ID NO: 772 - RNA, 19 nt, Artificial Sequence
  Description of Artificial Sequence: Synthetic oligonucleotide
aggaguucuacccucuucc

SEQ ID NO: 773 - RNA, 19 nt, Artificial Sequence
  Description of Artificial Sequence: Synthetic oligonucleotide
gaggaguucuacccucuuc

SEQ ID NO: 774 - RNA, 19 nt, Artificial Sequence
  Description of Artificial Sequence: Synthetic oligonucleotide
ugaggaguucuacccucuu

SEQ ID NO: 775 - RNA, 19 nt, Artificial Sequence
  Description of Artificial Sequence: Synthetic oligonucleotide
gugaggaguucuacccucu

SEQ ID NO: 776 - RNA, 19 nt, Artificial Sequence
  Description of Artificial Sequence: Synthetic oligonucleotide
ggugaggaguucuacccuc

SEQ ID NO: 777 - RNA, 19 nt, Artificial Sequence
  Description of Artificial Sequence: Synthetic oligonucleotide
aggugaggaguucuacccu

SEQ ID NO: 778 - RNA, 19 nt, Artificial Sequence
  Description of Artificial Sequence: Synthetic oligonucleotide
gaggugaggaguucuaccc

SEQ ID NO: 779 - RNA, 19 nt, Artificial Sequence
  Description of Artificial Sequence: Synthetic oligonucleotide
ggaggugaggaguucuacc

SEQ ID NO: 780 - RNA, 19 nt, Artificial Sequence
  Description of Artificial Sequence: Synthetic oligonucleotide
uggaggugaggaguucuac

SEQ ID NO: 781 - RNA, 19 nt, Artificial Sequence
  Description of Artificial Sequence: Synthetic oligonucleotide
cuggaggugaggaguucua

SEQ ID NO: 782 - RNA, 19 nt, Artificial Sequence
  Description of Artificial Sequence: Synthetic oligonucleotide
ccuggaggugaggaguucu

SEQ ID NO: 783 - RNA, 19 nt, Artificial Sequence
  Description of Artificial Sequence: Synthetic oligonucleotide
aaaccccuggaggugagga

SEQ ID NO: 784 - RNA, 19 nt, Artificial Sequence
  Description of Artificial Sequence: Synthetic oligonucleotide
uucgcaaaccccuggaggu

SEQ ID NO: 785 - RNA, 19 nt, Artificial Sequence
  Description of Artificial Sequence: Synthetic oligonucleotide
auucgcaaaccccuggagg

SEQ ID NO: 786 - RNA, 19 nt, Artificial Sequence
  Description of Artificial Sequence: Synthetic oligonucleotide
aauucgcaaaccccuggag

SEQ ID NO: 787 - RNA, 19 nt, Artificial Sequence
  Description of Artificial Sequence: Synthetic oligonucleotide
aaauucgcaaaccccugga

SEQ ID NO: 788 - RNA, 19 nt, Artificial Sequence
  Description of Artificial Sequence: Synthetic oligonucleotide
uagcaaaauucgcaaaccc

SEQ ID NO: 789 - RNA, 19 nt, Artificial Sequence
  Description of Artificial Sequence: Synthetic oligonucleotide
uuagcaaaauucgcaaacc

SEQ ID NO: 790 - RNA, 19 nt, Artificial Sequence
  Description of Artificial Sequence: Synthetic oligonucleotide
cuuagcaaaauucgcaaac

SEQ ID NO: 791 - RNA, 19 nt, Artificial Sequence
  Description of Artificial Sequence: Synthetic oligonucleotide
ucuuagcaaaauucgcaaa

SEQ ID NO: 792 - RNA, 19 nt, Artificial Sequence
  Description of Artificial Sequence: Synthetic oligonucleotide
uucuuagcaaaauucgcaa

SEQ ID NO: 793 - RNA, 19 nt, Artificial Sequence
  Description of Artificial Sequence: Synthetic oligonucleotide
cuucuuagcaaaauucgca

SEQ ID NO: 794 - RNA, 19 nt, Artificial Sequence
  Description of Artificial Sequence: Synthetic oligonucleotide
gcuucuuagcaaaauucgc

SEQ ID NO: 795 - RNA, 19 nt, Artificial Sequence
  Description of Artificial Sequence: Synthetic oligonucleotide
ugcuucuuagcaaaauucg

SEQ ID NO: 796 - RNA, 19 nt, Artificial Sequence
  Description of Artificial Sequence: Synthetic oligonucleotide
cugcuucuuagcaaaauuc

SEQ ID NO: 797 - RNA, 19 nt, Artificial Sequence
  Description of Artificial Sequence: Synthetic oligonucleotide
ucugcuucuuagcaaaauu

SEQ ID NO: 798 - RNA, 19 nt, Artificial Sequence
  Description of Artificial Sequence: Synthetic oligonucleotide
gucugcuucuuagcaaaau

SEQ ID NO: 799 - RNA, 19 nt, Artificial Sequence
  Description of Artificial Sequence: Synthetic oligonucleotide
agucugcuucuuagcaaaa

SEQ ID NO: 800 - RNA, 19 nt, Artificial Sequence
  Description of Artificial Sequence: Synthetic oligonucleotide
aagucugcuucuuagcaaa

SEQ ID NO: 801 - RNA, 19 nt, Artificial Sequence
  Description of Artificial Sequence: Synthetic oligonucleotide
aaagucugcuucuuagcaa

SEQ ID NO: 802 - RNA, 19 nt, Artificial Sequence
  Description of Artificial Sequence: Synthetic oligonucleotide
aaaagucugcuucuuagca

SEQ ID NO: 803 - RNA, 19 nt, Artificial Sequence
  Description of Artificial Sequence: Synthetic oligonucleotide
uaaaagucugcuucuuagc

SEQ ID NO: 804 - RNA, 19 nt, Artificial Sequence
  Description of Artificial Sequence: Synthetic oligonucleotide
uuaaaagucugcuucuuag

SEQ ID NO: 805 - RNA, 19 nt, Artificial Sequence
  Description of Artificial Sequence: Synthetic oligonucleotide
guuaaaagucugcuucuua

SEQ ID NO: 806 - RNA, 19 nt, Artificial Sequence
  Description of Artificial Sequence: Synthetic oligonucleotide
uguuaaaagucugcuucuu

SEQ ID NO: 807 - RNA, 19 nt, Artificial Sequence
  Description of Artificial Sequence: Synthetic oligonucleotide
uuguuaaaagucugcuucu

SEQ ID NO: 808 - RNA, 19 nt, Artificial Sequence
  Description of Artificial Sequence: Synthetic oligonucleotide
cuuguuaaaagucugcuuc

SEQ ID NO: 809 - RNA, 19 nt, Artificial Sequence
  Description of Artificial Sequence: Synthetic oligonucleotide
ccuuguuaaaagucugcuu

SEQ ID NO: 810 - RNA, 19 nt, Artificial Sequence
  Description of Artificial Sequence: Synthetic oligonucleotide
accuuguuaaaagucugcu

SEQ ID NO: 811 - RNA, 19 nt, Artificial Sequence
  Description of Artificial Sequence: Synthetic oligonucleotide
caccuuguuaaaagucugc

SEQ ID NO: 812 - RNA, 19 nt, Artificial Sequence
  Description of Artificial Sequence: Synthetic oligonucleotide
ucaccuuguuaaaagucug

SEQ ID NO: 813 - RNA, 19 nt, Artificial Sequence
  Description of Artificial Sequence: Synthetic oligonucleotide
uucaccuuguuaaaagucu

SEQ ID NO: 814 - RNA, 19 nt, Artificial Sequence
  Description of Artificial Sequence: Synthetic oligonucleotide
cuucaccuuguuaaaaguc

SEQ ID NO: 815 - RNA, 19 nt, Artificial Sequence
  Description of Artificial Sequence: Synthetic oligonucleotide
acuucaccuuguuaaaagu

SEQ ID NO: 816 - RNA, 19 nt, Artificial Sequence
  Description of Artificial Sequence: Synthetic oligonucleotide
cacuucaccuuguuaaaag

SEQ ID NO: 817 - RNA, 19 nt, Artificial Sequence
  Description of Artificial Sequence: Synthetic oligonucleotide
ccacuucaccuuguuaaaa

SEQ ID NO: 818 - RNA, 19 nt, Artificial Sequence
  Description of Artificial Sequence: Synthetic oligonucleotide
accacuucaccuuguuaaa

SEQ ID NO: 819 - RNA, 19 nt, Artificial Sequence
  Description of Artificial Sequence: Synthetic oligonucleotide
uaccacuucaccuuguuaa

SEQ ID NO: 820 - RNA, 19 nt, Artificial Sequence
  Description of Artificial Sequence: Synthetic oligonucleotide
auaccacuucaccuuguua

SEQ ID NO: 821 - RNA, 19 nt, Artificial Sequence
  Description of Artificial Sequence: Synthetic oligonucleotide
aauaccacuucaccuuguu

SEQ ID NO: 822 - RNA, 19 nt, Artificial Sequence
  Description of Artificial Sequence: Synthetic oligonucleotide
aaauaccacuucaccuugu

SEQ ID NO: 823 - RNA, 19 nt, Artificial Sequence
  Description of Artificial Sequence: Synthetic oligonucleotide
aaaauaccacuucaccuug

SEQ ID NO: 824 - RNA, 19 nt, Artificial Sequence
  Description of Artificial Sequence: Synthetic oligonucleotide
caaaauaccacuucaccuu

SEQ ID NO: 825 - RNA, 19 nt, Artificial Sequence
  Description of Artificial Sequence: Synthetic oligonucleotide
ccaaaauaccacuucaccu

SEQ ID NO: 826 - RNA, 19 nt, Artificial Sequence
  Description of Artificial Sequence: Synthetic oligonucleotide
accaaaauaccacuucacc

SEQ ID NO: 827 - RNA, 19 nt, Artificial Sequence
  Description of Artificial Sequence: Synthetic oligonucleotide
caccaaaauaccacuucac

SEQ ID NO: 828 - RNA, 19 nt, Artificial Sequence
  Description of Artificial Sequence: Synthetic oligonucleotide
gcaccaaaauaccacuuca

SEQ ID NO: 829 - RNA, 19 nt, Artificial Sequence
  Description of Artificial Sequence: Synthetic oligonucleotide
ggcaccaaaauaccacuuc

SEQ ID NO: 830 - RNA, 19 nt, Artificial Sequence
  Description of Artificial Sequence: Synthetic oligonucleotide
gggcaccaaaauaccacuu

SEQ ID NO: 831 - RNA, 19 nt, Artificial Sequence
  Description of Artificial Sequence: Synthetic oligonucleotide
gcgggcaccaaaauaccac

SEQ ID NO: 832 - RNA, 19 nt, Artificial Sequence
  Description of Artificial Sequence: Synthetic oligonucleotide
agcgggcaccaaaauacca

SEQ ID NO: 833 - RNA, 19 nt, Artificial Sequence
  Description of Artificial Sequence: Synthetic oligonucleotide
cagcgggcaccaaaauacc

SEQ ID NO: 834 - RNA, 19 nt, Artificial Sequence
  Description of Artificial Sequence: Synthetic oligonucleotide
gcagcgggcaccaaaauac

SEQ ID NO: 835 - RNA, 19 nt, Artificial Sequence
  Description of Artificial Sequence: Synthetic oligonucleotide
ggcagcgggcaccaaaaua

SEQ ID NO: 836 - RNA, 19 nt, Artificial Sequence
  Description of Artificial Sequence: Synthetic oligonucleotide
uggcagcgggcaccaaaau

SEQ ID NO: 837 - RNA, 19 nt, Artificial Sequence
  Description of Artificial Sequence: Synthetic oligonucleotide
uuucucgauguggcagcgg

SEQ ID NO: 838 - RNA, 19 nt, Artificial Sequence
  Description of Artificial Sequence: Synthetic oligonucleotide
cuuucucgauguggcagcg

SEQ ID NO: 839 - RNA, 19 nt, Artificial Sequence
  Description of Artificial Sequence: Synthetic oligonucleotide
gcuuucucgauguggcagc

SEQ ID NO: 840 - RNA, 19 nt, Artificial Sequence
  Description of Artificial Sequence: Synthetic oligonucleotide
cgcuuucucgauguggcag

SEQ ID NO: 841 - RNA, 19 nt, Artificial Sequence
  Description of Artificial Sequence: Synthetic oligonucleotide
ucgcuuucucgauguggca

SEQ ID NO: 842 - RNA, 19 nt, Artificial Sequence
  Description of Artificial Sequence: Synthetic oligonucleotide
uucgcuuucucgauguggc

SEQ ID NO: 843 - RNA, 19 nt, Artificial Sequence
  Description of Artificial Sequence: Synthetic oligonucleotide
uuucgcuuucucgaugugg

SEQ ID NO: 844 - RNA, 19 nt, Artificial Sequence
  Description of Artificial Sequence: Synthetic oligonucleotide
cuuucgcuuucucgaugug

SEQ ID NO: 845 - RNA, 19 nt, Artificial Sequence
  Description of Artificial Sequence: Synthetic oligonucleotide
ccuuucgcuuucucgaugu

SEQ ID NO: 846 - RNA, 19 nt, Artificial Sequence
  Description of Artificial Sequence: Synthetic oligonucleotide
uccuuucgcuuucucgaug

SEQ ID NO: 847 - RNA, 19 nt, Artificial Sequence
  Description of Artificial Sequence: Synthetic oligonucleotide
uuccuuucgcuuucucgau

SEQ ID NO: 848 - RNA, 19 nt, Artificial Sequence
  Description of Artificial Sequence: Synthetic oligonucleotide
guuccuuucgcuuucucga

SEQ ID NO: 849 - RNA, 19 nt, Artificial Sequence
  Description of Artificial Sequence: Synthetic oligonucleotide
gguuccuuucgcuuucucg

SEQ ID NO: 850 - RNA, 19 nt, Artificial Sequence
  Description of Artificial Sequence: Synthetic oligonucleotide
cgguuccuuucgcuuucuc

SEQ ID NO: 851 - RNA, 19 nt, Artificial Sequence
  Description of Artificial Sequence: Synthetic oligonucleotide
ucgguuccuuucgcuuucu

SEQ ID NO: 852 - RNA, 19 nt, Artificial Sequence
  Description of Artificial Sequence: Synthetic oligonucleotide
gucgguuccuuucgcuuuc

SEQ ID NO: 853 - RNA, 19 nt, Artificial Sequence
  Description of Artificial Sequence: Synthetic oligonucleotide
ggucgguuccuuucgcuuu

SEQ ID NO: 854 - RNA, 19 nt, Artificial Sequence
  Description of Artificial Sequence: Synthetic oligonucleotide
uggucgguuccuuucgcuu

SEQ ID NO: 855 - RNA, 19 nt, Artificial Sequence
  Description of Artificial Sequence: Synthetic oligonucleotide
cuggucgguuccuuucgcu

SEQ ID NO: 856 - RNA, 19 nt, Artificial Sequence
  Description of Artificial Sequence: Synthetic oligonucleotide
ugcuggucgguuccuuucg

SEQ ID NO: 857 - RNA, 19 nt, Artificial Sequence
  Description of Artificial Sequence: Synthetic oligonucleotide
cugcuggucgguuccuuuc

SEQ ID NO: 858 - RNA, 19 nt, Artificial Sequence
  Description of Artificial Sequence: Synthetic oligonucleotide
ucugcuggucgguuccuuu

SEQ ID NO: 859 - RNA, 19 nt, Artificial Sequence
  Description of Artificial Sequence: Synthetic oligonucleotide
uucugcuggucgguuccuu

SEQ ID NO: 860 - RNA, 19 nt, Artificial Sequence
  Description of Artificial Sequence: Synthetic oligonucleotide
auucugcuggucgguuccu

SEQ ID NO: 861 - RNA, 19 nt, Artificial Sequence
  Description of Artificial Sequence: Synthetic oligonucleotide
uauucugcuggucgguucc

SEQ ID NO: 862 - RNA, 19 nt, Artificial Sequence
  Description of Artificial Sequence: Synthetic oligonucleotide
uuauucugcuggucgguuc

SEQ ID NO: 863 - RNA, 19 nt, Artificial Sequence
  Description of Artificial Sequence: Synthetic oligonucleotide
uuuauucugcuggucgguu

SEQ ID NO: 864 - RNA, 19 nt, Artificial Sequence
  Description of Artificial Sequence: Synthetic oligonucleotide
cuuuauucugcuggucggu

SEQ ID NO: 865 - RNA, 19 nt, Artificial Sequence
  Description of Artificial Sequence: Synthetic oligonucleotide
ucuuuauucugcuggucgg

SEQ ID NO: 866 - RNA, 19 nt, Artificial Sequence
  Description of Artificial Sequence: Synthetic oligonucleotide
uucuuuauucugcuggucg

SEQ ID NO: 867 - RNA, 19 nt, Artificial Sequence
  Description of Artificial Sequence: Synthetic oligonucleotide
auucuuuauucugcugguc

SEQ ID NO: 868 - RNA, 19 nt, Artificial Sequence
  Description of Artificial Sequence: Synthetic oligonucleotide
uauucuuuauucugcuggu

SEQ ID NO: 869 - RNA, 19 nt, Artificial Sequence
  Description of Artificial Sequence: Synthetic oligonucleotide
guauucuuuauucugcugg

SEQ ID NO: 870 - RNA, 19 nt, Artificial Sequence
  Description of Artificial Sequence: Synthetic oligonucleotide
aguauucuuuauucugcug

SEQ ID NO: 871 - RNA, 19 nt, Artificial Sequence
  Description of Artificial Sequence: Synthetic oligonucleotide
caguauucuuuauucugcu

SEQ ID NO: 872 - RNA, 19 nt, Artificial Sequence
  Description of Artificial Sequence: Synthetic oligonucleotide
gcaguauucuuuauucugc

SEQ ID NO: 873 - RNA, 19 nt, Artificial Sequence
  Description of Artificial Sequence: Synthetic oligonucleotide
ugcaguauucuuuauucug

SEQ ID NO: 874 - RNA, 19 nt, Artificial Sequence
  Description of Artificial Sequence: Synthetic oligonucleotide
cugcaguauucuuuauucu

SEQ ID NO: 875 - RNA, 19 nt, Artificial Sequence
  Description of Artificial Sequence: Synthetic oligonucleotide
acugcaguauucuuuauuc

SEQ ID NO: 876 - RNA, 19 nt, Artificial Sequence
  Description of Artificial Sequence: Synthetic oligonucleotide
uacugcaguauucuuuauu

SEQ ID NO: 877 - RNA, 19 nt, Artificial Sequence
  Description of Artificial Sequence: Synthetic oligonucleotide
uuacugcaguauucuuuau

SEQ ID NO: 878 - RNA, 19 nt, Artificial Sequence
  Description of Artificial Sequence: Synthetic oligonucleotide
uuuacugcaguauucuuua

SEQ ID NO: 879 - RNA, 19 nt, Artificial Sequence
  Description of Artificial Sequence: Synthetic oligonucleotide
cuuuacugcaguauucuuu

SEQ ID NO: 880 - RNA, 19 nt, Artificial Sequence
  Description of Artificial Sequence: Synthetic oligonucleotide
ucuuuacugcaguauucuu

SEQ ID NO: 881 - RNA, 19 nt, Artificial Sequence
  Description of Artificial Sequence: Synthetic oligonucleotide
uucuuuacugcaguauucu

SEQ ID NO: 882 - RNA, 19 nt, Artificial Sequence
  Description of Artificial Sequence: Synthetic oligonucleotide
cuucuuuacugcaguauuc

SEQ ID NO: 883 - RNA, 19 nt, Artificial Sequence
  Description of Artificial Sequence: Synthetic oligonucleotide
ccuucuuuacugcaguauu

SEQ ID NO: 884 - RNA, 19 nt, Artificial Sequence
  Description of Artificial Sequence: Synthetic oligonucleotide
gccuucuuuacugcaguau

SEQ ID NO: 885 - RNA, 19 nt, Artificial Sequence
  Description of Artificial Sequence: Synthetic oligonucleotide
ggccuucuuuacugcagua

SEQ ID NO: 886 - RNA, 19 nt, Artificial Sequence
  Description of Artificial Sequence: Synthetic oligonucleotide
uggccuucuuuacugcagu

SEQ ID NO: 887 - RNA, 19 nt, Artificial Sequence
  Description of Artificial Sequence: Synthetic oligonucleotide
guggccuucuuuacugcag

SEQ ID NO: 888 - RNA, 19 nt, Artificial Sequence
  Description of Artificial Sequence: Synthetic oligonucleotide
uguggccuucuuuacugca

SEQ ID NO: 889 - RNA, 19 nt, Artificial Sequence
  Description of Artificial Sequence: Synthetic oligonucleotide
auguggccuucuuuacugc

SEQ ID NO: 890 - RNA, 19 nt, Artificial Sequence
  Description of Artificial Sequence: Synthetic oligonucleotide
uauguggccuucuuuacug

SEQ ID NO: 891 - RNA, 19 nt, Artificial Sequence
  Description of Artificial Sequence: Synthetic oligonucleotide
guauguggccuucuuuacu

SEQ ID NO: 892 - RNA, 19 nt, Artificial Sequence
  Description of Artificial Sequence: Synthetic oligonucleotide
aguauguggccuucuuuac

SEQ ID NO: 893 - RNA, 19 nt, Artificial Sequence
  Description of Artificial Sequence: Synthetic oligonucleotide
aaguauguggccuucuuua

SEQ ID NO: 894 - RNA, 19 nt, Artificial Sequence
  Description of Artificial Sequence: Synthetic oligonucleotide
uaaguauguggccuucuuu

SEQ ID NO: 895 - RNA, 19 nt, Artificial Sequence
  Description of Artificial Sequence: Synthetic oligonucleotide
auaaguauguggccuucuu

SEQ ID NO: 896 - RNA, 19 nt, Artificial Sequence
  Description of Artificial Sequence: Synthetic oligonucleotide
gauaaguauguggccuucu

SEQ ID NO: 897 - RNA, 19 nt, Artificial Sequence
  Description of Artificial Sequence: Synthetic oligonucleotide
cgauaaguauguggccuuc

SEQ ID NO: 898 - RNA, 19 nt, Artificial Sequence
  Description of Artificial Sequence: Synthetic oligonucleotide
ucgauaaguauguggccuu

SEQ ID NO: 899 - RNA, 19 nt, Artificial Sequence
  Description of Artificial Sequence: Synthetic oligonucleotide
cucgauaaguauguggccu

SEQ ID NO: 900 - RNA, 19 nt, Artificial Sequence
  Description of Artificial Sequence: Synthetic oligonucleotide
acucgauaaguauguggcc

SEQ ID NO: 901 - RNA, 19 nt, Artificial Sequence
  Description of Artificial Sequence: Synthetic oligonucleotide
cacucgauaaguauguggc

SEQ ID NO: 902 - RNA, 19 nt, Artificial Sequence
  Description of Artificial Sequence: Synthetic oligonucleotide
acacucgauaaguaugugg

SEQ ID NO: 903 - RNA, 19 nt, Artificial Sequence
  Description of Artificial Sequence: Synthetic oligonucleotide
cacacucgauaaguaugug

SEQ ID NO: 904 - RNA, 19 nt, Artificial Sequence
  Description of Artificial Sequence: Synthetic oligonucleotide
ccacacucgauaaguaugu

SEQ ID NO: 905 - RNA, 19 nt, Artificial Sequence
  Description of Artificial Sequence: Synthetic oligonucleotide
uccacacucgauaaguaug

SEQ ID NO: 906 - RNA, 19 nt, Artificial Sequence
  Description of Artificial Sequence: Synthetic oligonucleotide
cuccacacucgauaaguau

SEQ ID NO: 907 - RNA, 19 nt, Artificial Sequence
  Description of Artificial Sequence: Synthetic oligonucleotide
gcuccacacucgauaagua

SEQ ID NO: 908 - RNA, 19 nt, Artificial Sequence
  Description of Artificial Sequence: Synthetic oligonucleotide
agcuccacacucgauaagu

SEQ ID NO: 909 - RNA, 19 nt, Artificial Sequence
  Description of Artificial Sequence: Synthetic oligonucleotide
gagcuccacacucgauaag

SEQ ID NO: 910 - RNA, 19 nt, Artificial Sequence
  Description of Artificial Sequence: Synthetic oligonucleotide
ggagcuccacacucgauaa

SEQ ID NO: 911 - RNA, 19 nt, Artificial Sequence
  Description of Artificial Sequence: Synthetic oligonucleotide
cggagcuccacacucgaua

SEQ ID NO: 912 - RNA, 19 nt, Artificial Sequence
  Description of Artificial Sequence: Synthetic oligonucleotide
uagacaggucgcugcgcuu

SEQ ID NO: 913 - RNA, 19 nt, Artificial Sequence
  Description of Artificial Sequence: Synthetic oligonucleotide
agcaguagacaggucgcug

SEQ ID NO: 914 - RNA, 19 nt, Artificial Sequence
  Description of Artificial Sequence: Synthetic oligonucleotide
cagcaguagacaggucgcu

SEQ ID NO: 915 - RNA, 19 nt, Artificial Sequence
  Description of Artificial Sequence: Synthetic oligonucleotide
acagcaguagacaggucgc

SEQ ID NO: 916 - RNA, 19 nt, Artificial Sequence
  Description of Artificial Sequence: Synthetic oligonucleotide
cacagcaguagacaggucg

SEQ ID NO: 917 - RNA, 19 nt, Artificial Sequence
  Description of Artificial Sequence: Synthetic oligonucleotide
ucacagcaguagacagguc

SEQ ID NO: 918 - RNA, 19 nt, Artificial Sequence
  Description of Artificial Sequence: Synthetic oligonucleotide
cucacagcaguagacaggu

SEQ ID NO: 919 - RNA, 19 nt, Artificial Sequence
  Description of Artificial Sequence: Synthetic oligonucleotide
acucacagcaguagacagg

SEQ ID NO: 920 - RNA, 19 nt, Artificial Sequence
  Description of Artificial Sequence: Synthetic oligonucleotide
uacucacagcaguagacag

SEQ ID NO: 921 - RNA, 19 nt, Artificial Sequence
  Description of Artificial Sequence: Synthetic oligonucleotide
guacucacagcaguagaca

SEQ ID NO: 922 - RNA, 19 nt, Artificial Sequence
  Description of Artificial Sequence: Synthetic oligonucleotide
gguacucacagcaguagac

SEQ ID NO: 923 - RNA, 19 nt, Artificial Sequence
  Description of Artificial Sequence: Synthetic oligonucleotide
ggguacucacagcaguaga

SEQ ID NO: 924 - RNA, 19 nt, Artificial Sequence
  Description of Artificial Sequence: Synthetic oligonucleotide
aggguacucacagcaguag

SEQ ID NO: 925 - RNA, 19 nt, Artificial Sequence
  Description of Artificial Sequence: Synthetic oligonucleotide
aaggguacucacagcagua

SEQ ID NO: 926 - RNA, 19 nt, Artificial Sequence
  Description of Artificial Sequence: Synthetic oligonucleotide
aaaggguacucacagcagu

SEQ ID NO: 927 - RNA, 19 nt, Artificial Sequence
  Description of Artificial Sequence: Synthetic oligonucleotide
aaaaggguacucacagcag

SEQ ID NO: 928 - RNA, 19 nt, Artificial Sequence
  Description of Artificial Sequence: Synthetic oligonucleotide
caaaaggguacucacagca

SEQ ID NO: 929 - RNA, 19 nt, Artificial Sequence
  Description of Artificial Sequence: Synthetic oligonucleotide
ccaaaaggguacucacagc

SEQ ID NO: 930 - RNA, 19 nt, Artificial Sequence
  Description of Artificial Sequence: Synthetic oligonucleotide
uccaaaaggguacucacag

SEQ ID NO: 931 - RNA, 19 nt, Artificial Sequence
  Description of Artificial Sequence: Synthetic oligonucleotide
cuccaaaaggguacucaca

SEQ ID NO: 932 - RNA, 19 nt, Artificial Sequence
  Description of Artificial Sequence: Synthetic oligonucleotide
ucuccaaaaggguacucac

SEQ ID NO: 933 - RNA, 19 nt, Artificial Sequence
  Description of Artificial Sequence: Synthetic oligonucleotide
gucuccaaaaggguacuca

SEQ ID NO: 934 - RNA, 19 nt, Artificial Sequence
  Description of Artificial Sequence: Synthetic oligonucleotide
cgucuccaaaaggguacuc

SEQ ID NO: 935 - RNA, 19 nt, Artificial Sequence
  Description of Artificial Sequence: Synthetic oligonucleotide
ccgucuccaaaaggguacu

SEQ ID NO: 936 - RNA, 19 nt, Artificial Sequence
  Description of Artificial Sequence: Synthetic oligonucleotide
cccgucuccaaaaggguac

SEQ ID NO: 937 - RNA, 19 nt, Artificial Sequence
  Description of Artificial Sequence: Synthetic oligonucleotide
caaagaccccgucuccaaa

SEQ ID NO: 938 - RNA, 19 nt, Artificial Sequence
  Description of Artificial Sequence: Synthetic oligonucleotide
ccaaagaccccgucuccaa

SEQ ID NO: 939 - RNA, 19 nt, Artificial Sequence
  Description of Artificial Sequence: Synthetic oligonucleotide
accaaagaccccgucucca

SEQ ID NO: 940 - RNA, 19 nt, Artificial Sequence
  Description of Artificial Sequence: Synthetic oligonucleotide
ucaccaaagaccccgucuc

SEQ ID NO: 941 - RNA, 19 nt, Artificial Sequence
  Description of Artificial Sequence: Synthetic oligonucleotide
gucaccaaagaccccgucu

SEQ ID NO: 942 - RNA, 19 nt, Artificial Sequence
  Description of Artificial Sequence: Synthetic oligonucleotide
agucaccaaagaccccguc

SEQ ID NO: 943 - RNA, 19 nt, Artificial Sequence
  Description of Artificial Sequence: Synthetic oligonucleotide
cagucaccaaagaccccgu

SEQ ID NO: 944 - RNA, 19 nt, Artificial Sequence
  Description of Artificial Sequence: Synthetic oligonucleotide
acagucaccaaagaccccg

SEQ ID NO: 945 - RNA, 19 nt, Artificial Sequence
  Description of Artificial Sequence: Synthetic oligonucleotide
uacagucaccaaagacccc

SEQ ID NO: 946 - RNA, 19 nt, Artificial Sequence
  Description of Artificial Sequence: Synthetic oligonucleotide
cuacagucaccaaagaccc

SEQ ID NO: 947 - RNA, 19 nt, Artificial Sequence
  Description of Artificial Sequence: Synthetic oligonucleotide
gcuacagucaccaaagacc

SEQ ID NO: 948 - RNA, 19 nt, Artificial Sequence
  Description of Artificial Sequence: Synthetic oligonucleotide
ggcuacagucaccaaagac

SEQ ID NO: 949 - RNA, 19 nt, Artificial Sequence
  Description of Artificial Sequence: Synthetic oligonucleotide
cggcuacagucaccaaaga

SEQ ID NO: 950 - RNA, 19 nt, Artificial Sequence
  Description of Artificial Sequence: Synthetic oligonucleotide
ucggcuacagucaccaaag

SEQ ID NO: 951 - RNA, 19 nt, Artificial Sequence
  Description of Artificial Sequence: Synthetic oligonucleotide
cucggcuacagucaccaaa

SEQ ID NO: 952 - RNA, 19 nt, Artificial Sequence
  Description of Artificial Sequence: Synthetic oligonucleotide
gcucggcuacagucaccaa

SEQ ID NO: 953 - RNA, 19 nt, Artificial Sequence
  Description of Artificial Sequence: Synthetic oligonucleotide
ugcucggcuacagucacca

SEQ ID NO: 954 - RNA, 19 nt, Artificial Sequence
  Description of Artificial Sequence: Synthetic oligonucleotide
acugcucggcuacagucac

SEQ ID NO: 955 - RNA, 19 nt, Artificial Sequence
  Description of Artificial Sequence: Synthetic oligonucleotide
aacugcucggcuacaguca

SEQ ID NO: 956 - RNA, 19 nt, Artificial Sequence
  Description of Artificial Sequence: Synthetic oligonucleotide
gaacugcucggcuacaguc

SEQ ID NO: 957 - RNA, 19 nt, Artificial Sequence
  Description of Artificial Sequence: Synthetic oligonucleotide
ggaacugcucggcuacagu

SEQ ID NO: 958 - RNA, 19 nt, Artificial Sequence
  Description of Artificial Sequence: Synthetic oligonucleotide
agggaacugcucggcuaca

SEQ ID NO: 959 - RNA, 19 nt, Artificial Sequence
  Description of Artificial Sequence: Synthetic oligonucleotide
acagggaacugcucggcua

SEQ ID NO: 960 - RNA, 19 nt, Artificial Sequence
  Description of Artificial Sequence: Synthetic oligonucleotide
uacagggaacugcucggcu

SEQ ID NO: 961 - RNA, 19 nt, Artificial Sequence
  Description of Artificial Sequence: Synthetic oligonucleotide
uuacagggaacugcucggc

SEQ ID NO: 962 - RNA, 19 nt, Artificial Sequence
  Description of Artificial Sequence: Synthetic oligonucleotide
guuacagggaacugcucgg

SEQ ID NO: 963 - RNA, 19 nt, Artificial Sequence
  Description of Artificial Sequence: Synthetic oligonucleotide
cguuacagggaacugcucg

SEQ ID NO: 964 - RNA, 19 nt, Artificial Sequence
  Description of Artificial Sequence: Synthetic oligonucleotide
acguuacagggaacugcuc

SEQ ID NO: 965 - RNA, 19 nt, Artificial Sequence
  Description of Artificial Sequence: Synthetic oligonucleotide
uacguuacagggaacugcu

SEQ ID NO: 966 - RNA, 19 nt, Artificial Sequence
  Description of Artificial Sequence: Synthetic oligonucleotide
auacguuacagggaacugc

SEQ ID NO: 967 - RNA, 19 nt, Artificial Sequence
  Description of Artificial Sequence: Synthetic oligonucleotide
cauacguuacagggaacug

SEQ ID NO: 968 - RNA, 19 nt, Artificial Sequence
  Description of Artificial Sequence: Synthetic oligonucleotide
acauacguuacagggaacu

SEQ ID NO: 969 - RNA, 19 nt, Artificial Sequence
  Description of Artificial Sequence: Synthetic oligonucleotide
cacauacguuacagggaac

SEQ ID NO: 970 - RNA, 19 nt, Artificial Sequence
  Description of Artificial Sequence: Synthetic oligonucleotide
ucacauacguuacagggaa

SEQ ID NO: 971 - RNA, 19 nt, Artificial Sequence
  Description of Artificial Sequence: Synthetic oligonucleotide
cucacauacguuacaggga

SEQ ID NO: 972 - RNA, 19 nt, Artificial Sequence
  Description of Artificial Sequence: Synthetic oligonucleotide
ucucacauacguuacaggg

SEQ ID NO: 973 - RNA, 19 nt, Artificial Sequence
  Description of Artificial Sequence: Synthetic oligonucleotide
uucucacauacguuacagg

SEQ ID NO: 974 - RNA, 19 nt, Artificial Sequence
  Description of Artificial Sequence: Synthetic oligonucleotide
uuucucacauacguuacag

SEQ ID NO: 975 - RNA, 19 nt, Artificial Sequence
  Description of Artificial Sequence: Synthetic oligonucleotide
auuucucacauacguuaca

SEQ ID NO: 976 - RNA, 19 nt, Artificial Sequence
  Description of Artificial Sequence: Synthetic oligonucleotide
aauuucucacauacguuac

SEQ ID NO: 977 - RNA, 19 nt, Artificial Sequence
  Description of Artificial Sequence: Synthetic oligonucleotide
aaauuucucacauacguua

SEQ ID NO: 978 - RNA, 19 nt, Artificial Sequence
  Description of Artificial Sequence: Synthetic oligonucleotide
gaaauuucucacauacguu

SEQ ID NO: 979 - RNA, 19 nt, Artificial Sequence
  Description of Artificial Sequence: Synthetic oligonucleotide
ggaaauuucucacauacgu

SEQ ID NO: 980 - RNA, 19 nt, Artificial Sequence
  Description of Artificial Sequence: Synthetic oligonucleotide
cggaaauuucucacauacg

SEQ ID NO: 981 - RNA, 19 nt, Artificial Sequence
  Description of Artificial Sequence: Synthetic oligonucleotide
gcggaaauuucucacauac

SEQ ID NO: 982 - RNA, 19 nt, Artificial Sequence
  Description of Artificial Sequence: Synthetic oligonucleotide
cgcggaaauuucucacaua

SEQ ID NO: 983 - RNA, 19 nt, Artificial Sequence
  Description of Artificial Sequence: Synthetic oligonucleotide
ccgcggaaauuucucacau

SEQ ID NO: 984 - RNA, 19 nt, Artificial Sequence
  Description of Artificial Sequence: Synthetic oligonucleotide
cccgcggaaauuucucaca

SEQ ID NO: 985 - RNA, 19 nt, Artificial Sequence
  Description of Artificial Sequence: Synthetic oligonucleotide
gcccgcggaaauuucucac

SEQ ID NO: 986 - RNA, 19 nt, Artificial Sequence
  Description of Artificial Sequence: Synthetic oligonucleotide
agcccgcggaaauuucuca

SEQ ID NO: 987 - RNA, 19 nt, Artificial Sequence
  Description of Artificial Sequence: Synthetic oligonucleotide
cagcccgcggaaauuucuc

SEQ ID NO: 988 - RNA, 19 nt, Artificial Sequence
  Description of Artificial Sequence: Synthetic oligonucleotide
ccagcccgcggaaauuucu

SEQ ID NO: 989 - RNA, 19 nt, Artificial Sequence
  Description of Artificial Sequence: Synthetic oligonucleotide
agccagcccgcggaaauuu

SEQ ID NO: 990 - RNA, 19 nt, Artificial Sequence
  Description of Artificial Sequence: Synthetic oligonucleotide
aaaaguucagccagcccgc

SEQ ID NO: 991 - RNA, 19 nt, Artificial Sequence
  Description of Artificial Sequence: Synthetic oligonucleotide
caaaaguucagccagcccg

SEQ ID NO: 992 - RNA, 19 nt, Artificial Sequence
  Description of Artificial Sequence: Synthetic oligonucleotide
ucaaaaguucagccagccc

SEQ ID NO: 993 - RNA, 19 nt, Artificial Sequence
  Description of Artificial Sequence: Synthetic oligonucleotide
uucaaaaguucagccagcc

SEQ ID NO: 994 - RNA, 19 nt, Artificial Sequence
  Description of Artificial Sequence: Synthetic oligonucleotide
uuucaaaaguucagccagc

SEQ ID NO: 995 - RNA, 19 nt, Artificial Sequence
  Description of Artificial Sequence: Synthetic oligonucleotide
cuuucaaaaguucagccag

SEQ ID NO: 996 - RNA, 19 nt, Artificial Sequence
  Description of Artificial Sequence: Synthetic oligonucleotide
acuuucaaaaguucagcca

SEQ ID NO: 997 - RNA, 19 nt, Artificial Sequence
  Description of Artificial Sequence: Synthetic oligonucleotide
cacuuucaaaaguucagcc

SEQ ID NO: 998 - RNA, 19 nt, Artificial Sequence
  Description of Artificial Sequence: Synthetic oligonucleotide
ucacuuucaaaaguucagc

SEQ ID NO: 999 - RNA, 19 nt, Artificial Sequence
  Description of Artificial Sequence: Synthetic oligonucleotide
cucacuuucaaaaguucag

SEQ ID NO: 1000 - RNA, 19 nt, Artificial Sequence
  Description of Artificial Sequence: Synthetic oligonucleotide
gcucacuuucaaaaguuca

SEQ ID NO: 1001 - RNA, 19 nt, Artificial Sequence
  Description of Artificial Sequence: Synthetic oligonucleotide
cgcucacuuucaaaaguuc

SEQ ID NO: 1002 - RNA, 19 nt, Artificial Sequence
  Description of Artificial Sequence: Synthetic oligonucleotide
ccgcucacuuucaaaaguu

SEQ ID NO: 1003 - RNA, 19 nt, Artificial Sequence
  Description of Artificial Sequence: Synthetic oligonucleotide
cccgcucacuuucaaaagu

SEQ ID NO: 1004 - RNA, 19 nt, Artificial Sequence
  Description of Artificial Sequence: Synthetic oligonucleotide
ucccgcucacuuucaaaag

SEQ ID NO: 1005 - RNA, 19 nt, Artificial Sequence
  Description of Artificial Sequence: Synthetic oligonucleotide
uucccgcucacuuucaaaa

SEQ ID NO: 1006 - RNA, 19 nt, Artificial Sequence
  Description of Artificial Sequence: Synthetic oligonucleotide
cuucccgcucacuuucaaa

SEQ ID NO: 1007 - RNA, 19 nt, Artificial Sequence
  Description of Artificial Sequence: Synthetic oligonucleotide
ucuucccgcucacuuucaa

SEQ ID NO: 1008 - RNA, 19 nt, Artificial Sequence
  Description of Artificial Sequence: Synthetic oligonucleotide
aucuucccgcucacuuuca

SEQ ID NO: 1009 - RNA, 19 nt, Artificial Sequence
  Description of Artificial Sequence: Synthetic oligonucleotide
caucuucccgcucacuuuc

SEQ ID NO: 1010 - RNA, 19 nt, Artificial Sequence
  Description of Artificial Sequence: Synthetic oligonucleotide
gcaucuucccgcucacuuu

SEQ ID NO: 1011 - RNA, 19 nt, Artificial Sequence
  Description of Artificial Sequence: Synthetic oligonucleotide
ugcaucuucccgcucacuu

SEQ ID NO: 1012 - RNA, 19 nt, Artificial Sequence
  Description of Artificial Sequence: Synthetic oligonucleotide
cugcaucuucccgcucacu

SEQ ID NO: 1013 - RNA, 19 nt, Artificial Sequence
  Description of Artificial Sequence: Synthetic oligonucleotide
ugcugcaucuucccgcuca

SEQ ID NO: 1014 - RNA, 19 nt, Artificial Sequence
  Description of Artificial Sequence: Synthetic oligonucleotide
ucacgcugcugcaucuucc

SEQ ID NO: 1015 - RNA, 19 nt, Artificial Sequence
  Description of Artificial Sequence: Synthetic oligonucleotide
aucacgcugcugcaucuuc

SEQ ID NO: 1016 - RNA, 19 nt, Artificial Sequence
  Description of Artificial Sequence: Synthetic oligonucleotide
aaucacgcugcugcaucuu

SEQ ID NO: 1017 - RNA, 19 nt, Artificial Sequence
  Description of Artificial Sequence: Synthetic oligonucleotide
caaucacgcugcugcaucu

SEQ ID NO: 1018 - RNA, 19 nt, Artificial Sequence
  Description of Artificial Sequence: Synthetic oligonucleotide
ccaaucacgcugcugcauc

SEQ ID NO: 1019 - RNA, 19 nt, Artificial Sequence
  Description of Artificial Sequence: Synthetic oligonucleotide
uccaaucacgcugcugcau

SEQ ID NO: 1020 - RNA, 19 nt, Artificial Sequence
  Description of Artificial Sequence: Synthetic oligonucleotide
uuccaaucacgcugcugca

SEQ ID NO: 1021 - RNA, 19 nt, Artificial Sequence
  Description of Artificial Sequence: Synthetic oligonucleotide
cuuccaaucacgcugcugc

SEQ ID NO: 1022 - RNA, 19 nt, Artificial Sequence
  Description of Artificial Sequence: Synthetic oligonucleotide
ucuuccaaucacgcugcug

SEQ ID NO: 1023 - RNA, 19 nt, Artificial Sequence
  Description of Artificial Sequence: Synthetic oligonucleotide
gucuuccaaucacgcugcu

SEQ ID NO: 1024 - RNA, 19 nt, Artificial Sequence
  Description of Artificial Sequence: Synthetic oligonucleotide
ugucuuccaaucacgcugc

SEQ ID NO: 1025 - RNA, 19 nt, Artificial Sequence
  Description of Artificial Sequence: Synthetic oligonucleotide
cugucuuccaaucacgcug

SEQ ID NO: 1026 - RNA, 19 nt, Artificial Sequence
  Description of Artificial Sequence: Synthetic oligonucleotide
gcugucuuccaaucacgcu

SEQ ID NO: 1027 - RNA, 19 nt, Artificial Sequence
  Description of Artificial Sequence: Synthetic oligonucleotide
agcugucuuccaaucacgc

SEQ ID NO: 1028 - RNA, 19 nt, Artificial Sequence
  Description of Artificial Sequence: Synthetic oligonucleotide
cagcugucuuccaaucacg

SEQ ID NO: 1029 - RNA, 19 nt, Artificial Sequence
  Description of Artificial Sequence: Synthetic oligonucleotide
acagcugucuuccaaucac

SEQ ID NO: 1030 - RNA, 19 nt, Artificial Sequence
  Description of Artificial Sequence: Synthetic oligonucleotide
uacagcugucuuccaauca

SEQ ID NO: 1031 - RNA, 19 nt, Artificial Sequence
  Description of Artificial Sequence: Synthetic oligonucleotide
guacagcugucuuccaauc

SEQ ID NO: 1032 - RNA, 19 nt, Artificial Sequence
  Description of Artificial Sequence: Synthetic oligonucleotide
uguacagcugucuuccaau

SEQ ID NO: 1033 - RNA, 19 nt, Artificial Sequence
  Description of Artificial Sequence: Synthetic oligonucleotide
guguacagcugucuuccaa

SEQ ID NO: 1034 - RNA, 19 nt, Artificial Sequence
  Description of Artificial Sequence: Synthetic oligonucleotide
cguguacagcugucuucca

SEQ ID NO: 1035 - RNA, 19 nt, Artificial Sequence
  Description of Artificial Sequence: Synthetic oligonucleotide
acguguacagcugucuucc

SEQ ID NO: 1036 - RNA, 19 nt, Artificial Sequence
  Description of Artificial Sequence: Synthetic oligonucleotide
gacguguacagcugucuuc

SEQ ID NO: 1037 - RNA, 19 nt, Artificial Sequence
  Description of Artificial Sequence: Synthetic oligonucleotide
ugacguguacagcugucuu

SEQ ID NO: 1038 - RNA, 19 nt, Artificial Sequence
  Description of Artificial Sequence: Synthetic oligonucleotide
augacguguacagcugucu

SEQ ID NO: 1039 - RNA, 19 nt, Artificial Sequence
  Description of Artificial Sequence: Synthetic oligonucleotide
uaugacguguacagcuguc

SEQ ID NO: 1040 - RNA, 19 nt, Artificial Sequence
  Description of Artificial Sequence: Synthetic oligonucleotide
cuaugacguguacagcugu

SEQ ID NO: 1041 - RNA, 19 nt, Artificial Sequence
  Description of Artificial Sequence: Synthetic oligonucleotide
acuaugacguguacagcug

SEQ ID NO: 1042 - RNA, 19 nt, Artificial Sequence
  Description of Artificial Sequence: Synthetic oligonucleotide
cacuaugacguguacagcu

SEQ ID NO: 1043 - RNA, 19 nt, Artificial Sequence
  Description of Artificial Sequence: Synthetic oligonucleotide
ccacuaugacguguacagc

SEQ ID NO: 1044 - RNA, 19 nt, Artificial Sequence
  Description of Artificial Sequence: Synthetic oligonucleotide
cccacuaugacguguacag

SEQ ID NO: 1045 - RNA, 19 nt, Artificial Sequence
  Description of Artificial Sequence: Synthetic oligonucleotide
gcccacuaugacguguaca

SEQ ID NO: 1046 - RNA, 19 nt, Artificial Sequence
  Description of Artificial Sequence: Synthetic oligonucleotide
ggcccacuaugacguguac

SEQ ID NO: 1047 - RNA, 19 nt, Artificial Sequence
  Description of Artificial Sequence: Synthetic oligonucleotide
gggcccacuaugacgugua

SEQ ID NO: 1048 - RNA, 19 nt, Artificial Sequence
  Description of Artificial Sequence: Synthetic oligonucleotide
acuggcucuucccacaacc

SEQ ID NO: 1049 - RNA, 19 nt, Artificial Sequence
  Description of Artificial Sequence: Synthetic oligonucleotide
cacuggcucuucccacaac

SEQ ID NO: 1050 - RNA, 19 nt, Artificial Sequence
  Description of Artificial Sequence: Synthetic oligonucleotide
ccacuggcucuucccacaa

SEQ ID NO: 1051 - RNA, 19 nt, Artificial Sequence
  Description of Artificial Sequence: Synthetic oligonucleotide
aauuacgggcccacuggcu

SEQ ID NO: 1052 - RNA, 19 nt, Artificial Sequence
  Description of Artificial Sequence: Synthetic oligonucleotide
aaauuacgggcccacuggc

SEQ ID NO: 1053 - RNA, 19 nt, Artificial Sequence
  Description of Artificial Sequence: Synthetic oligonucleotide
aaaauuacgggcccacugg

SEQ ID NO: 1054 - RNA, 19 nt, Artificial Sequence
  Description of Artificial Sequence: Synthetic oligonucleotide
caaaauuacgggcccacug

SEQ ID NO: 1055 - RNA, 19 nt, Artificial Sequence
  Description of Artificial Sequence: Synthetic oligonucleotide
gcaaaauuacgggcccacu

SEQ ID NO: 1056 - RNA, 19 nt, Artificial Sequence
  Description of Artificial Sequence: Synthetic oligonucleotide
agcaaaauuacgggcccac

SEQ ID NO: 1057 - RNA, 19 nt, Artificial Sequence
  Description of Artificial Sequence: Synthetic oligonucleotide
cagcaaaauuacgggccca

SEQ ID NO: 1058 - RNA, 19 nt, Artificial Sequence
  Description of Artificial Sequence: Synthetic oligonucleotide
ucagcaaaauuacgggccc

SEQ ID NO: 1059 - RNA, 19 nt, Artificial Sequence
  Description of Artificial Sequence: Synthetic oligonucleotide
cucagcaaaauuacgggcc

SEQ ID NO: 1060 - RNA, 19 nt, Artificial Sequence
  Description of Artificial Sequence: Synthetic oligonucleotide
gcucagcaaaauuacgggc

SEQ ID NO: 1061 - RNA, 19 nt, Artificial Sequence
  Description of Artificial Sequence: Synthetic oligonucleotide
ggcucagcaaaauuacggg

SEQ ID NO: 1062 - RNA, 19 nt, Artificial Sequence
  Description of Artificial Sequence: Synthetic oligonucleotide
aggcucagcaaaauuacgg

SEQ ID NO: 1063 - RNA, 19 nt, Artificial Sequence
  Description of Artificial Sequence: Synthetic oligonucleotide
uaggcucagcaaaauuacg

SEQ ID NO: 1064 - RNA, 19 nt, Artificial Sequence
  Description of Artificial Sequence: Synthetic oligonucleotide
cuaggcucagcaaaauuac

SEQ ID NO: 1065 - RNA, 19 nt, Artificial Sequence
  Description of Artificial Sequence: Synthetic oligonucleotide
gcuaggcucagcaaaauua

SEQ ID NO: 1066 - RNA, 19 nt, Artificial Sequence
  Description of Artificial Sequence: Synthetic oligonucleotide
cgcuaggcucagcaaaauu

SEQ ID NO: 1067 - RNA, 19 nt, Artificial Sequence
  Description of Artificial Sequence: Synthetic oligonucleotide
ucgcuaggcucagcaaaau

SEQ ID NO: 1068 - RNA, 19 nt, Artificial Sequence
  Description of Artificial Sequence: Synthetic oligonucleotide
gucgcuaggcucagcaaaa

SEQ ID NO: 1069 - RNA, 19 nt, Artificial Sequence
  Description of Artificial Sequence: Synthetic oligonucleotide
ugucgcuaggcucagcaaa

SEQ ID NO: 1070 - RNA, 19 nt, Artificial Sequence
  Description of Artificial Sequence: Synthetic oligonucleotide
gugucgcuaggcucagcaa

SEQ ID NO: 1071 - RNA, 19 nt, Artificial Sequence
  Description of Artificial Sequence: Synthetic oligonucleotide
uaggugucgcuaggcucag

SEQ ID NO: 1072 - RNA, 19 nt, Artificial Sequence
  Description of Artificial Sequence: Synthetic oligonucleotide
guaggugucgcuaggcuca

SEQ ID NO: 1073 - RNA, 19 nt, Artificial Sequence
  Description of Artificial Sequence: Synthetic oligonucleotide
aguaggugucgcuaggcuc

SEQ ID NO: 1074 - RNA, 19 nt, Artificial Sequence
  Description of Artificial Sequence: Synthetic oligonucleotide
caguaggugucgcuaggcu

SEQ ID NO: 1075 - RNA, 19 nt, Artificial Sequence
  Description of Artificial Sequence: Synthetic oligonucleotide
uccaguaggugucgcuagg

SEQ ID NO: 1076 - RNA, 19 nt, Artificial Sequence
  Description of Artificial Sequence: Synthetic oligonucleotide
uuccaguaggugucgcuag

SEQ ID NO: 1077 - RNA, 19 nt, Artificial Sequence
  Description of Artificial Sequence: Synthetic oligonucleotide
cuuccaguaggugucgcua

SEQ ID NO: 1078 - RNA, 19 nt, Artificial Sequence
  Description of Artificial Sequence: Synthetic oligonucleotide
gcuuccaguaggugucgcu

SEQ ID NO: 1079 - RNA, 19 nt, Artificial Sequence
  Description of Artificial Sequence: Synthetic oligonucleotide
aggcuuccaguaggugucg

SEQ ID NO: 1080 - RNA, 19 nt, Artificial Sequence
  Description of Artificial Sequence: Synthetic oligonucleotide
uaggcuuccaguagguguc

SEQ ID NO: 1081 - RNA, 19 nt, Artificial Sequence
  Description of Artificial Sequence: Synthetic oligonucleotide
cuaggcuuccaguaggugu

SEQ ID NO: 1082 - RNA, 19 nt, Artificial Sequence
  Description of Artificial Sequence: Synthetic oligonucleotide
acuaggcuuccaguaggug

SEQ ID NO: 1083 - RNA, 19 nt, Artificial Sequence
  Description of Artificial Sequence: Synthetic oligonucleotide
uacuaggcuuccaguaggu

SEQ ID NO: 1084 - RNA, 19 nt, Artificial Sequence
  Description of Artificial Sequence: Synthetic oligonucleotide
cuacuaggcuuccaguagg

SEQ ID NO: 1085 - RNA, 19 nt, Artificial Sequence
  Description of Artificial Sequence: Synthetic oligonucleotide
ucuacuaggcuuccaguag

SEQ ID NO: 1086 - RNA, 19 nt, Artificial Sequence
  Description of Artificial Sequence: Synthetic oligonucleotide
uucuacuaggcuuccagua

SEQ ID NO: 1087 - RNA, 19 nt, Artificial Sequence
  Description of Artificial Sequence: Synthetic oligonucleotide
uuucuacuaggcuuccagu

SEQ ID NO: 1088 - RNA, 19 nt, Artificial Sequence
  Description of Artificial Sequence: Synthetic oligonucleotide
auuucuacuaggcuuccag

SEQ ID NO: 1089 - RNA, 19 nt, Artificial Sequence
  Description of Artificial Sequence: Synthetic oligonucleotide
uauuucuacuaggcuucca

SEQ ID NO: 1090 - RNA, 19 nt, Artificial Sequence
  Description of Artificial Sequence: Synthetic oligonucleotide
uuauuucuacuaggcuucc

SEQ ID NO: 1091 - RNA, 19 nt, Artificial Sequence
  Description of Artificial Sequence: Synthetic oligonucleotide
cuuauuucuacuaggcuuc

SEQ ID NO: 1092 - RNA, 19 nt, Artificial Sequence
  Description of Artificial Sequence: Synthetic oligonucleotide
acuuauuucuacuaggcuu

SEQ ID NO: 1093 - RNA, 19 nt, Artificial Sequence
  Description of Artificial Sequence: Synthetic oligonucleotide
cacuuauuucuacuaggcu

SEQ ID NO: 1094 - RNA, 19 nt, Artificial Sequence
  Description of Artificial Sequence: Synthetic oligonucleotide
ccacuuauuucuacuaggc

SEQ ID NO: 1095 - RNA, 19 nt, Artificial Sequence
  Description of Artificial Sequence: Synthetic oligonucleotide
accacuuauuucuacuagg

SEQ ID NO: 1096 - RNA, 19 nt, Artificial Sequence
  Description of Artificial Sequence: Synthetic oligonucleotide
caccacuuauuucuacuag

SEQ ID NO: 1097 - RNA, 19 nt, Artificial Sequence
  Description of Artificial Sequence: Synthetic oligonucleotide
ccaccacuuauuucuacua

SEQ ID NO: 1098 - RNA, 19 nt, Artificial Sequence
  Description of Artificial Sequence: Synthetic oligonucleotide
cccaccacuuauuucuacu

SEQ ID NO: 1099 - RNA, 19 nt, Artificial Sequence
  Description of Artificial Sequence: Synthetic oligonucleotide
ucccaccacuuauuucuac

SEQ ID NO: 1100 - RNA, 19 nt, Artificial Sequence
  Description of Artificial Sequence: Synthetic oligonucleotide
aucccaccacuuauuucua

SEQ ID NO: 1101 - RNA, 19 nt, Artificial Sequence
  Description of Artificial Sequence: Synthetic oligonucleotide
caucccaccacuuauuucu

SEQ ID NO: 1102 - RNA, 19 nt, Artificial Sequence
  Description of Artificial Sequence: Synthetic oligonucleotide
ccaucccaccacuuauuuc

SEQ ID NO: 1103 - RNA, 19 nt, Artificial Sequence
  Description of Artificial Sequence: Synthetic oligonucleotide
uccaucccaccacuuauuu

SEQ ID NO: 1104 - RNA, 19 nt, Artificial Sequence
  Description of Artificial Sequence: Synthetic oligonucleotide
auccaucccaccacuuauu

SEQ ID NO: 1105 - RNA, 19 nt, Artificial Sequence
  Description of Artificial Sequence: Synthetic oligonucleotide
uauccaucccaccacuuau

SEQ ID NO: 1106 - RNA, 19 nt, Artificial Sequence
  Description of Artificial Sequence: Synthetic oligonucleotide
auauccaucccaccacuua

SEQ ID NO: 1107 - RNA, 19 nt, Artificial Sequence
  Description of Artificial Sequence: Synthetic oligonucleotide
gauauccaucccaccacuu

SEQ ID NO: 1108 - RNA, 19 nt, Artificial Sequence
  Description of Artificial Sequence: Synthetic oligonucleotide
ugauauccaucccaccacu

SEQ ID NO: 1109 - RNA, 19 nt, Artificial Sequence
  Description of Artificial Sequence: Synthetic oligonucleotide
augauauccaucccaccac

SEQ ID NO: 1110 - RNA, 19 nt, Artificial Sequence
  Description of Artificial Sequence: Synthetic oligonucleotide
caugauauccaucccacca

SEQ ID NO: 1111 - RNA, 19 nt, Artificial Sequence
  Description of Artificial Sequence: Synthetic oligonucleotide
ccaugauauccaucccacc

SEQ ID NO: 1112 - RNA, 19 nt, Artificial Sequence
  Description of Artificial Sequence: Synthetic oligonucleotide
uccaugauauccaucccac

SEQ ID NO: 1113 - RNA, 19 nt, Artificial Sequence
  Description of Artificial Sequence: Synthetic oligonucleotide
cuccaugauauccauccca

SEQ ID NO: 1114 - RNA, 19 nt, Artificial Sequence
  Description of Artificial Sequence: Synthetic oligonucleotide
ucuccaugauauccauccc

SEQ ID NO: 1115 - RNA, 19 nt, Artificial Sequence
  Description of Artificial Sequence: Synthetic oligonucleotide
uucuccaugauauccaucc

SEQ ID NO: 1116 - RNA, 19 nt, Artificial Sequence
  Description of Artificial Sequence: Synthetic oligonucleotide
cuucuccaugauauccauc

SEQ ID NO: 1117 - RNA, 19 nt, Artificial Sequence
  Description of Artificial Sequence: Synthetic oligonucleotide
ucuucuccaugauauccau

SEQ ID NO: 1118 - RNA, 19 nt, Artificial Sequence
  Description of Artificial Sequence: Synthetic oligonucleotide
uucuucuccaugauaucca

SEQ ID NO: 1119 - RNA, 19 nt, Artificial Sequence
  Description of Artificial Sequence: Synthetic oligonucleotide
cuucuucuccaugauaucc

SEQ ID NO: 1120 - RNA, 19 nt, Artificial Sequence
  Description of Artificial Sequence: Synthetic oligonucleotide
acuucuucuccaugauauc

SEQ ID NO: 1121 - RNA, 19 nt, Artificial Sequence
  Description of Artificial Sequence: Synthetic oligonucleotide
aacuucuucuccaugauau

SEQ ID NO: 1122 - RNA, 19 nt, Artificial Sequence
  Description of Artificial Sequence: Synthetic oligonucleotide
caacuucuucuccaugaua

SEQ ID NO: 1123 - RNA, 19 nt, Artificial Sequence
  Description of Artificial Sequence: Synthetic oligonucleotide
acaacuucuucuccaugau

SEQ ID NO: 1124 - RNA, 19 nt, Artificial Sequence
  Description of Artificial Sequence: Synthetic oligonucleotide
aacaacuucuucuccauga

SEQ ID NO: 1125 - RNA, 19 nt, Artificial Sequence
  Description of Artificial Sequence: Synthetic oligonucleotide
caacaacuucuucuccaug

SEQ ID NO: 1126 - RNA, 19 nt, Artificial Sequence
  Description of Artificial Sequence: Synthetic oligonucleotide
acaacaacuucuucuccau

SEQ ID NO: 1127 - RNA, 19 nt, Artificial Sequence
  Description of Artificial Sequence: Synthetic oligonucleotide
aacaacaacuucuucucca

SEQ ID NO: 1128 - RNA, 19 nt, Artificial Sequence
  Description of Artificial Sequence: Synthetic oligonucleotide
aaacaacaacuucuucucc

SEQ ID NO: 1129 - RNA, 19 nt, Artificial Sequence
  Description of Artificial Sequence: Synthetic oligonucleotide
aaaacaacaacuucuucuc

SEQ ID NO: 1130 - RNA, 19 nt, Artificial Sequence
  Description of Artificial Sequence: Synthetic oligonucleotide
caaaacaacaacuucuucu

SEQ ID NO: 1131 - RNA, 19 nt, Artificial Sequence
  Description of Artificial Sequence: Synthetic oligonucleotide
ccaaaacaacaacuucuuc

SEQ ID NO: 1132 - RNA, 19 nt, Artificial Sequence
  Description of Artificial Sequence: Synthetic oligonucleotide
uccaaaacaacaacuucuu

SEQ ID NO: 1133 - RNA, 19 nt, Artificial Sequence
  Description of Artificial Sequence: Synthetic oligonucleotide
auccaaaacaacaacuucu

SEQ ID NO: 1134 - RNA, 19 nt, Artificial Sequence
  Description of Artificial Sequence: Synthetic oligonucleotide
cauccaaaacaacaacuuc

SEQ ID NO: 1135 - RNA, 19 nt, Artificial Sequence
  Description of Artificial Sequence: Synthetic oligonucleotide
ucauccaaaacaacaacuu

SEQ ID NO: 1136 - RNA, 19 nt, Artificial Sequence
  Description of Artificial Sequence: Synthetic oligonucleotide
aucauccaaaacaacaacu

SEQ ID NO: 1137 - RNA, 19 nt, Artificial Sequence
  Description of Artificial Sequence: Synthetic oligonucleotide
aaucauccaaaacaacaac

SEQ ID NO: 1138 - RNA, 19 nt, Artificial Sequence
  Description of Artificial Sequence: Synthetic oligonucleotide
aaaucauccaaaacaacaa

SEQ ID NO: 1139 - RNA, 19 nt, Artificial Sequence
  Description of Artificial Sequence: Synthetic oligonucleotide
aagguaaccagccauaaaa

SEQ ID NO: 1140 - RNA, 19 nt, Artificial Sequence
  Description of Artificial Sequence: Synthetic oligonucleotide
caagguaaccagccauaaa

SEQ ID NO: 1141 - RNA, 19 nt, Artificial Sequence
  Description of Artificial Sequence: Synthetic oligonucleotide
ccaagguaaccagccauaa

SEQ ID NO: 1142 - RNA, 19 nt, Artificial Sequence
  Description of Artificial Sequence: Synthetic oligonucleotide
cccaagguaaccagccaua

SEQ ID NO: 1143 - RNA, 19 nt, Artificial Sequence
  Description of Artificial Sequence: Synthetic oligonucleotide
ucccaagguaaccagccau

SEQ ID NO: 1144 - RNA, 19 nt, Artificial Sequence
  Description of Artificial Sequence: Synthetic oligonucleotide
aucccaagguaaccagcca

SEQ ID NO: 1145 - RNA, 19 nt, Artificial Sequence
  Description of Artificial Sequence: Synthetic oligonucleotide
caucccaagguaaccagcc

SEQ ID NO: 1146 - RNA, 19 nt, Artificial Sequence
  Description of Artificial Sequence: Synthetic oligonucleotide
ucaucccaagguaaccagc

SEQ ID NO: 1147 - RNA, 19 nt, Artificial Sequence
  Description of Artificial Sequence: Synthetic oligonucleotide
aucaucccaagguaaccag

SEQ ID NO: 1148 - RNA, 19 nt, Artificial Sequence
  Description of Artificial Sequence: Synthetic oligonucleotide
gaucaucccaagguaacca

SEQ ID NO: 1149 - RNA, 19 nt, Artificial Sequence
  Description of Artificial Sequence: Synthetic oligonucleotide
agaucaucccaagguaacc

SEQ ID NO: 1150 - RNA, 19 nt, Artificial Sequence
  Description of Artificial Sequence: Synthetic oligonucleotide
uagaucaucccaagguaac

SEQ ID NO: 1151 - RNA, 19 nt, Artificial Sequence
  Description of Artificial Sequence: Synthetic oligonucleotide
guagaucaucccaagguaa

SEQ ID NO: 1152 - RNA, 19 nt, Artificial Sequence
  Description of Artificial Sequence: Synthetic oligonucleotide
aguagaucaucccaaggua

SEQ ID NO: 1153 - RNA, 19 nt, Artificial Sequence
  Description of Artificial Sequence: Synthetic oligonucleotide
caguagaucaucccaaggu

SEQ ID NO: 1154 - RNA, 19 nt, Artificial Sequence
  Description of Artificial Sequence: Synthetic oligonucleotide
ucaguagaucaucccaagg

SEQ ID NO: 1155 - RNA, 19 nt, Artificial Sequence
  Description of Artificial Sequence: Synthetic oligonucleotide
cucaguagaucaucccaag

SEQ ID NO: 1156 - RNA, 19 nt, Artificial Sequence
  Description of Artificial Sequence: Synthetic oligonucleotide
ucucaguagaucaucccaa

SEQ ID NO: 1157 - RNA, 19 nt, Artificial Sequence
  Description of Artificial Sequence: Synthetic oligonucleotide
gucucaguagaucauccca

SEQ ID NO: 1158 - RNA, 19 nt, Artificial Sequence
  Description of Artificial Sequence: Synthetic oligonucleotide
agucucaguagaucauccc

SEQ ID NO: 1159 - RNA, 19 nt, Artificial Sequence
  Description of Artificial Sequence: Synthetic oligonucleotide
cagucucaguagaucaucc

SEQ ID NO: 1160 - RNA, 19 nt, Artificial Sequence
  Description of Artificial Sequence: Synthetic oligonucleotide
acagucucaguagaucauc

SEQ ID NO: 1161 - RNA, 19 nt, Artificial Sequence
  Description of Artificial Sequence: Synthetic oligonucleotide
cacagucucaguagaucau

SEQ ID NO: 1162 - RNA, 19 nt, Artificial Sequence
  Description of Artificial Sequence: Synthetic oligonucleotide
acacagucucaguagauca

SEQ ID NO: 1163 - RNA, 19 nt, Artificial Sequence
  Description of Artificial Sequence: Synthetic oligonucleotide
cacacagucucaguagauc

SEQ ID NO: 1164 - RNA, 19 nt, Artificial Sequence
  Description of Artificial Sequence: Synthetic oligonucleotide
ucacacagucucaguagau

SEQ ID NO: 1165 - RNA, 19 nt, Artificial Sequence
  Description of Artificial Sequence: Synthetic oligonucleotide
gucacacagucucaguaga

SEQ ID NO: 1166 - RNA, 19 nt, Artificial Sequence
  Description of Artificial Sequence: Synthetic oligonucleotide
ggucacacagucucaguag

SEQ ID NO: 1167 - RNA, 19 nt, Artificial Sequence
  Description of Artificial Sequence: Synthetic oligonucleotide
cggucacacagucucagua

SEQ ID NO: 1168 - RNA, 19 nt, Artificial Sequence
  Description of Artificial Sequence: Synthetic oligonucleotide
ccggucacacagucucagu

SEQ ID NO: 1169 - RNA, 19 nt, Artificial Sequence
  Description of Artificial Sequence: Synthetic oligonucleotide
accggucacacagucucag

SEQ ID NO: 1170 - RNA, 19 nt, Artificial Sequence
  Description of Artificial Sequence: Synthetic oligonucleotide
uaccggucacacagucuca

SEQ ID NO: 1171 - RNA, 19 nt, Artificial Sequence
  Description of Artificial Sequence: Synthetic oligonucleotide
auaccggucacacagucuc

SEQ ID NO: 1172 - RNA, 19 nt, Artificial Sequence
  Description of Artificial Sequence: Synthetic oligonucleotide
gauaccggucacacagucu

SEQ ID NO: 1173 - RNA, 19 nt, Artificial Sequence
  Description of Artificial Sequence: Synthetic oligonucleotide
ggauaccggucacacaguc

SEQ ID NO: 1174 - RNA, 19 nt, Artificial Sequence
  Description of Artificial Sequence: Synthetic oligonucleotide
uggauaccggucacacagu

SEQ ID NO: 1175 - RNA, 19 nt, Artificial Sequence
  Description of Artificial Sequence: Synthetic oligonucleotide
auggauaccggucacacag

SEQ ID NO: 1176 - RNA, 19 nt, Artificial Sequence
  Description of Artificial Sequence: Synthetic oligonucleotide
aauggauaccggucacaca

SEQ ID NO: 1177 - RNA, 19 nt, Artificial Sequence
  Description of Artificial Sequence: Synthetic oligonucleotide
caauggauaccggucacac

SEQ ID NO: 1178 - RNA, 19 nt, Artificial Sequence
  Description of Artificial Sequence: Synthetic oligonucleotide
ucaauggauaccggucaca

SEQ ID NO: 1179 - RNA, 19 nt, Artificial Sequence
  Description of Artificial Sequence: Synthetic oligonucleotide
gucaauggauaccggucac

SEQ ID NO: 1180 - RNA, 19 nt, Artificial Sequence
  Description of Artificial Sequence: Synthetic oligonucleotide
agucaauggauaccgguca

SEQ ID NO: 1181 - RNA, 19 nt, Artificial Sequence
  Description of Artificial Sequence: Synthetic oligonucleotide
cagucaauggauaccgguc

SEQ ID NO: 1182 - RNA, 19 nt, Artificial Sequence
  Description of Artificial Sequence: Synthetic oligonucleotide
acagucaauggauaccggu

SEQ ID NO: 1183 - RNA, 19 nt, Artificial Sequence
  Description of Artificial Sequence: Synthetic oligonucleotide
uacagucaauggauaccgg

SEQ ID NO: 1184 - RNA, 19 nt, Artificial Sequence
  Description of Artificial Sequence: Synthetic oligonucleotide
cuacagucaauggauaccg

SEQ ID NO: 1185 - RNA, 19 nt, Artificial Sequence
  Description of Artificial Sequence: Synthetic oligonucleotide
ucuacagucaauggauacc

SEQ ID NO: 1186 - RNA, 19 nt, Artificial Sequence
  Description of Artificial Sequence: Synthetic oligonucleotide
cucuacagucaauggauac

SEQ ID NO: 1187 - RNA, 19 nt, Artificial Sequence
  Description of Artificial Sequence: Synthetic oligonucleotide
ucucuacagucaauggaua

SEQ ID NO: 1188 - RNA, 19 nt, Artificial Sequence
  Description of Artificial Sequence: Synthetic oligonucleotide
gucucuacagucaauggau

SEQ ID NO: 1189 - RNA, 19 nt, Artificial Sequence
  Description of Artificial Sequence: Synthetic oligonucleotide
agucucuacagucaaugga

SEQ ID NO: 1190 - RNA, 19 nt, Artificial Sequence
  Description of Artificial Sequence: Synthetic oligonucleotide
uagucucuacagucaaugg

SEQ ID NO: 1191 - RNA, 19 nt, Artificial Sequence
  Description of Artificial Sequence: Synthetic oligonucleotide
uuagucucuacagucaaug

SEQ ID NO: 1192 - RNA, 19 nt, Artificial Sequence
  Description of Artificial Sequence: Synthetic oligonucleotide
uuuagucucuacagucaau

SEQ ID NO: 1193 - RNA, 19 nt, Artificial Sequence
  Description of Artificial Sequence: Synthetic oligonucleotide
cuuuagucucuacagucaa

SEQ ID NO: 1194 - RNA, 19 nt, Artificial Sequence
  Description of Artificial Sequence: Synthetic oligonucleotide
ccuuuagucucuacaguca

SEQ ID NO: 1195 - RNA, 19 nt, Artificial Sequence
  Description of Artificial Sequence: Synthetic oligonucleotide
cccuuuagucucuacaguc

SEQ ID NO: 1196 - RNA, 19 nt, Artificial Sequence
  Description of Artificial Sequence: Synthetic oligonucleotide
ccccuuuagucucuacagu

SEQ ID NO: 1197 - RNA, 19 nt, Artificial Sequence
  Description of Artificial Sequence: Synthetic oligonucleotide
caaaauacugcgggccaaa

SEQ ID NO: 1198 - RNA, 19 nt, Artificial Sequence
  Description of Artificial Sequence: Synthetic oligonucleotide
ucaaaauacugcgggccaa

SEQ ID NO: 1199 - RNA, 19 nt, Artificial Sequence
  Description of Artificial Sequence: Synthetic oligonucleotide
aucaaaauacugcgggcca

SEQ ID NO: 1200 - RNA, 19 nt, Artificial Sequence
  Description of Artificial Sequence: Synthetic oligonucleotide
aaucaaaauacugcgggcc

SEQ ID NO: 1201 - RNA, 19 nt, Artificial Sequence
  Description of Artificial Sequence: Synthetic oligonucleotide
uaaucaaaauacugcgggc

SEQ ID NO: 1202 - RNA, 19 nt, Artificial Sequence
  Description of Artificial Sequence: Synthetic oligonucleotide
guaaucaaaauacugcggg

SEQ ID NO: 1203 - RNA, 19 nt, Artificial Sequence
  Description of Artificial Sequence: Synthetic oligonucleotide
gguaaucaaaauacugcgg

SEQ ID NO: 1204 - RNA, 19 nt, Artificial Sequence
  Description of Artificial Sequence: Synthetic oligonucleotide
ugguaaucaaaauacugcg

SEQ ID NO: 1205 - RNA, 19 nt, Artificial Sequence
  Description of Artificial Sequence: Synthetic oligonucleotide
cugguaaucaaaauacugc

SEQ ID NO: 1206 - RNA, 19 nt, Artificial Sequence
  Description of Artificial Sequence: Synthetic oligonucleotide
gcugguaaucaaaauacug

SEQ ID NO: 1207 - RNA, 19 nt, Artificial Sequence
  Description of Artificial Sequence: Synthetic oligonucleotide
ugcugguaaucaaaauacu

SEQ ID NO: 1208 - RNA, 19 nt, Artificial Sequence
  Description of Artificial Sequence: Synthetic oligonucleotide
uugcugguaaucaaaauac

SEQ ID NO: 1209 - RNA, 19 nt, Artificial Sequence
  Description of Artificial Sequence: Synthetic oligonucleotide
auugcugguaaucaaaaua

SEQ ID NO: 1210 - RNA, 19 nt, Artificial Sequence
  Description of Artificial Sequence: Synthetic oligonucleotide
gauugcugguaaucaaaau

SEQ ID NO: 1211 - RNA, 19 nt, Artificial Sequence
  Description of Artificial Sequence: Synthetic oligonucleotide
ugauugcugguaaucaaaa

SEQ ID NO: 1212 - RNA, 19 nt, Artificial Sequence
  Description of Artificial Sequence: Synthetic oligonucleotide
cugauugcugguaaucaaa

SEQ ID NO: 1213 - RNA, 19 nt, Artificial Sequence
  Description of Artificial Sequence: Synthetic oligonucleotide
ccugauugcugguaaucaa

SEQ ID NO: 1214 - RNA, 19 nt, Artificial Sequence
  Description of Artificial Sequence: Synthetic oligonucleotide
gccugauugcugguaauca

SEQ ID NO: 1215 - RNA, 19 nt, Artificial Sequence
  Description of Artificial Sequence: Synthetic oligonucleotide
ggccugauugcugguaauc

SEQ ID NO: 1216 - RNA, 19 nt, Artificial Sequence
  Description of Artificial Sequence: Synthetic oligonucleotide
gggccugauugcugguaau

SEQ ID NO: 1217 - RNA, 19 nt, Artificial Sequence
  Description of Artificial Sequence: Synthetic oligonucleotide
ggggccugauugcugguaa

SEQ ID NO: 1218 - RNA, 19 nt, Artificial Sequence
  Description of Artificial Sequence: Synthetic oligonucleotide
aggaguaccauuccugggg

SEQ ID NO: 1219 - RNA, 19 nt, Artificial Sequence
  Description of Artificial Sequence: Synthetic oligonucleotide
gaggaguaccauuccuggg

SEQ ID NO: 1220 - RNA, 19 nt, Artificial Sequence
  Description of Artificial Sequence: Synthetic oligonucleotide
ugaggaguaccauuccugg

SEQ ID NO: 1221 - RNA, 19 nt, Artificial Sequence
  Description of Artificial Sequence: Synthetic oligonucleotide
uugaggaguaccauuccug

SEQ ID NO: 1222 - RNA, 19 nt, Artificial Sequence
  Description of Artificial Sequence: Synthetic oligonucleotide
guugaggaguaccauuccu

SEQ ID NO: 1223 - RNA, 19 nt, Artificial Sequence
  Description of Artificial Sequence: Synthetic oligonucleotide
aguugaggaguaccauucc

SEQ ID NO: 1224 - RNA, 19 nt, Artificial Sequence
  Description of Artificial Sequence: Synthetic oligonucleotide
caguugaggaguaccauuc

SEQ ID NO: 1225 - RNA, 19 nt, Artificial Sequence
  Description of Artificial Sequence: Synthetic oligonucleotide
gcaguugaggaguaccauu

SEQ ID NO: 1226 - RNA, 19 nt, Artificial Sequence
  Description of Artificial Sequence: Synthetic oligonucleotide
agcaguugaggaguaccau

SEQ ID NO: 1227 - RNA, 19 nt, Artificial Sequence
  Description of Artificial Sequence: Synthetic oligonucleotide
cagcaguugaggaguacca

SEQ ID NO: 1228 - RNA, 19 nt, Artificial Sequence
  Description of Artificial Sequence: Synthetic oligonucleotide
acagcaguugaggaguacc

SEQ ID NO: 1229 - RNA, 19 nt, Artificial Sequence
  Description of Artificial Sequence: Synthetic oligonucleotide
gacagcaguugaggaguac

SEQ ID NO: 1230 - RNA, 19 nt, Artificial Sequence
  Description of Artificial Sequence: Synthetic oligonucleotide
ggacagcaguugaggagua

SEQ ID NO: 1231 - RNA, 19 nt, Artificial Sequence
  Description of Artificial Sequence: Synthetic oligonucleotide
gggacagcaguugaggagu

SEQ ID NO: 1232 - RNA, 19 nt, Artificial Sequence
  Description of Artificial Sequence: Synthetic oligonucleotide
ugggacagcaguugaggag

SEQ ID NO: 1233 - RNA, 19 nt, Artificial Sequence
  Description of Artificial Sequence: Synthetic oligonucleotide
cugggacagcaguugagga

SEQ ID NO: 1234 - RNA, 19 nt, Artificial Sequence
  Description of Artificial Sequence: Synthetic oligonucleotide
agcugggacagcaguugag

SEQ ID NO: 1235 - RNA, 19 nt, Artificial Sequence
  Description of Artificial Sequence: Synthetic oligonucleotide
cagcugggacagcaguuga

SEQ ID NO: 1236 - RNA, 19 nt, Artificial Sequence
  Description of Artificial Sequence: Synthetic oligonucleotide
acagcugggacagcaguug

SEQ ID NO: 1237 - RNA, 19 nt, Artificial Sequence
  Description of Artificial Sequence: Synthetic oligonucleotide
uacagcugggacagcaguu

SEQ ID NO: 1238 - RNA, 19 nt, Artificial Sequence
  Description of Artificial Sequence: Synthetic oligonucleotide
cuacagcugggacagcagu

SEQ ID NO: 1239 - RNA, 19 nt, Artificial Sequence
  Description of Artificial Sequence: Synthetic oligonucleotide
ucuacagcugggacagcag

SEQ ID NO: 1240 - RNA, 19 nt, Artificial Sequence
  Description of Artificial Sequence: Synthetic oligonucleotide
uucuacagcugggacagca

SEQ ID NO: 1241 - RNA, 19 nt, Artificial Sequence
  Description of Artificial Sequence: Synthetic oligonucleotide
cuucuacagcugggacagc

SEQ ID NO: 1242 - RNA, 19 nt, Artificial Sequence
  Description of Artificial Sequence: Synthetic oligonucleotide
gcuucuacagcugggacag

SEQ ID NO: 1243 - RNA, 19 nt, Artificial Sequence
  Description of Artificial Sequence: Synthetic oligonucleotide
agcuucuacagcugggaca

SEQ ID NO: 1244 - RNA, 19 nt, Artificial Sequence
  Description of Artificial Sequence: Synthetic oligonucleotide
gagcuucuacagcugggac

SEQ ID NO: 1245 - RNA, 19 nt, Artificial Sequence
  Description of Artificial Sequence: Synthetic oligonucleotide
agagcuucuacagcuggga

SEQ ID NO: 1246 - RNA, 19 nt, Artificial Sequence
  Description of Artificial Sequence: Synthetic oligonucleotide
gagagcuucuacagcuggg

SEQ ID NO: 1247 - RNA, 19 nt, Artificial Sequence
  Description of Artificial Sequence: Synthetic oligonucleotide
agagagcuucuacagcugg

SEQ ID NO: 1248 - RNA, 19 nt, Artificial Sequence
  Description of Artificial Sequence: Synthetic oligonucleotide
uagagagcuucuacagcug

SEQ ID NO: 1249 - RNA, 19 nt, Artificial Sequence
  Description of Artificial Sequence: Synthetic oligonucleotide
auagagagcuucuacagcu

SEQ ID NO: 1250 - RNA, 19 nt, Artificial Sequence
  Description of Artificial Sequence: Synthetic oligonucleotide
gauagagagcuucuacagc

SEQ ID NO: 1251 - RNA, 19 nt, Artificial Sequence
  Description of Artificial Sequence: Synthetic oligonucleotide
cgauagagagcuucuacag

SEQ ID NO: 1252 - RNA, 19 nt, Artificial Sequence
  Description of Artificial Sequence: Synthetic oligonucleotide
ccgauagagagcuucuaca

SEQ ID NO: 1253 - RNA, 19 nt, Artificial Sequence
  Description of Artificial Sequence: Synthetic oligonucleotide
uccgauagagagcuucuac

SEQ ID NO: 1254 - RNA, 19 nt, Artificial Sequence
  Description of Artificial Sequence: Synthetic oligonucleotide
cuccgauagagagcuucua

SEQ ID NO: 1255 - RNA, 19 nt, Artificial Sequence
  Description of Artificial Sequence: Synthetic oligonucleotide
ccuccgauagagagcuucu

SEQ ID NO: 1256 - RNA, 19 nt, Artificial Sequence
  Description of Artificial Sequence: Synthetic oligonucleotide
uccuccgauagagagcuuc

SEQ ID NO: 1257 - RNA, 19 nt, Artificial Sequence
  Description of Artificial Sequence: Synthetic oligonucleotide
auccuccgauagagagcuu

SEQ ID NO: 1258 - RNA, 19 nt, Artificial Sequence
  Description of Artificial Sequence: Synthetic oligonucleotide
aauccuccgauagagagcu

SEQ ID NO: 1259 - RNA, 19 nt, Artificial Sequence
  Description of Artificial Sequence: Synthetic oligonucleotide
uaauccuccgauagagagc

SEQ ID NO: 1260 - RNA, 19 nt, Artificial Sequence
  Description of Artificial Sequence: Synthetic oligonucleotide
guaauccuccgauagagag

SEQ ID NO: 1261 - RNA, 19 nt, Artificial Sequence
  Description of Artificial Sequence: Synthetic oligonucleotide
aguaauccuccgauagaga

SEQ ID NO: 1262 - RNA, 19 nt, Artificial Sequence
  Description of Artificial Sequence: Synthetic oligonucleotide
uaguaauccuccgauagag

SEQ ID NO: 1263 - RNA, 19 nt, Artificial Sequence
  Description of Artificial Sequence: Synthetic oligonucleotide
guaguaauccuccgauaga

SEQ ID NO: 1264 - RNA, 19 nt, Artificial Sequence
  Description of Artificial Sequence: Synthetic oligonucleotide
aguaguaauccuccgauag

SEQ ID NO: 1265 - RNA, 19 nt, Artificial Sequence
  Description of Artificial Sequence: Synthetic oligonucleotide
aaguaguaauccuccgaua

SEQ ID NO: 1266 - RNA, 19 nt, Artificial Sequence
  Description of Artificial Sequence: Synthetic oligonucleotide
aaaguaguaauccuccgau

SEQ ID NO: 1267 - RNA, 19 nt, Artificial Sequence
  Description of Artificial Sequence: Synthetic oligonucleotide
caaaguaguaauccuccga

SEQ ID NO: 1268 - RNA, 19 nt, Artificial Sequence
  Description of Artificial Sequence: Synthetic oligonucleotide
gcaaaguaguaauccuccg

SEQ ID NO: 1269 - RNA, 19 nt, Artificial Sequence
  Description of Artificial Sequence: Synthetic oligonucleotide
ugcaaaguaguaauccucc

SEQ ID NO: 1270 - RNA, 19 nt, Artificial Sequence
  Description of Artificial Sequence: Synthetic oligonucleotide
uugcaaaguaguaauccuc

SEQ ID NO: 1271 - RNA, 19 nt, Artificial Sequence
  Description of Artificial Sequence: Synthetic oligonucleotide
auugcaaaguaguaauccu

SEQ ID NO: 1272 - RNA, 19 nt, Artificial Sequence
  Description of Artificial Sequence: Synthetic oligonucleotide
aauugcaaaguaguaaucc

SEQ ID NO: 1273 - RNA, 19 nt, Artificial Sequence
  Description of Artificial Sequence: Synthetic oligonucleotide
aaauugcaaaguaguaauc

SEQ ID NO: 1274 - RNA, 19 nt, Artificial Sequence
  Description of Artificial Sequence: Synthetic oligonucleotide
aaaauugcaaaguaguaau

SEQ ID NO: 1275 - RNA, 19 nt, Artificial Sequence
  Description of Artificial Sequence: Synthetic oligonucleotide
caaaauugcaaaguaguaa

SEQ ID NO: 1276 - RNA, 19 nt, Artificial Sequence
  Description of Artificial Sequence: Synthetic oligonucleotide
ccaaaauugcaaaguagua

SEQ ID NO: 1277 - RNA, 19 nt, Artificial Sequence
  Description of Artificial Sequence: Synthetic oligonucleotide
uccaaaauugcaaaguagu

SEQ ID NO: 1278 - RNA, 19 nt, Artificial Sequence
  Description of Artificial Sequence: Synthetic oligonucleotide
uuccaaaauugcaaaguag

SEQ ID NO: 1279 - RNA, 19 nt, Artificial Sequence
  Description of Artificial Sequence: Synthetic oligonucleotide
cuuccaaaauugcaaagua

SEQ ID NO: 1280 - RNA, 19 nt, Artificial Sequence
  Description of Artificial Sequence: Synthetic oligonucleotide
ucuuccaaaauugcaaagu

SEQ ID NO: 1281 - RNA, 19 nt, Artificial Sequence
  Description of Artificial Sequence: Synthetic oligonucleotide
gucuuccaaaauugcaaag

SEQ ID NO: 1282 - RNA, 19 nt, Artificial Sequence
  Description of Artificial Sequence: Synthetic oligonucleotide
agucuuccaaaauugcaaa

SEQ ID NO: 1283 - RNA, 19 nt, Artificial Sequence
  Description of Artificial Sequence: Synthetic oligonucleotide
cagucuuccaaaauugcaa

SEQ ID NO: 1284 - RNA, 19 nt, Artificial Sequence
  Description of Artificial Sequence: Synthetic oligonucleotide
gcagucuuccaaaauugca

SEQ ID NO: 1285 - RNA, 19 nt, Artificial Sequence
  Description of Artificial Sequence: Synthetic oligonucleotide
agcagucuuccaaaauugc

SEQ ID NO: 1286 - RNA, 19 nt, Artificial Sequence
  Description of Artificial Sequence: Synthetic oligonucleotide
cagcagucuuccaaaauug

SEQ ID NO: 1287 - RNA, 19 nt, Artificial Sequence
  Description of Artificial Sequence: Synthetic oligonucleotide
ccagcagucuuccaaaauu

SEQ ID NO: 1288 - RNA, 19 nt, Artificial Sequence
  Description of Artificial Sequence: Synthetic oligonucleotide
uccagcagucuuccaaaau

SEQ ID NO: 1289 - RNA, 19 nt, Artificial Sequence
  Description of Artificial Sequence: Synthetic oligonucleotide
cuccagcagucuuccaaaa

SEQ ID NO: 1290 - RNA, 19 nt, Artificial Sequence
  Description of Artificial Sequence: Synthetic oligonucleotide
ucuccagcagucuuccaaa

SEQ ID NO: 1291 - RNA, 19 nt, Artificial Sequence
  Description of Artificial Sequence: Synthetic oligonucleotide
uucuccagcagucuuccaa

SEQ ID NO: 1292 - RNA, 19 nt, Artificial Sequence
  Description of Artificial Sequence: Synthetic oligonucleotide
guucuccagcagucuucca

SEQ ID NO: 1293 - RNA, 19 nt, Artificial Sequence
  Description of Artificial Sequence: Synthetic oligonucleotide
uguucuccagcagucuucc

SEQ ID NO: 1294 - RNA, 19 nt, Artificial Sequence
  Description of Artificial Sequence: Synthetic oligonucleotide
uuguucuccagcagucuuc

SEQ ID NO: 1295 - RNA, 19 nt, Artificial Sequence
  Description of Artificial Sequence: Synthetic oligonucleotide
auuguucuccagcagucuu

SEQ ID NO: 1296 - RNA, 19 nt, Artificial Sequence
  Description of Artificial Sequence: Synthetic oligonucleotide
gauuguucuccagcagucu

SEQ ID NO: 1297 - RNA, 19 nt, Artificial Sequence
  Description of Artificial Sequence: Synthetic oligonucleotide
ggauuguucuccagcaguc

SEQ ID NO: 1298 - RNA, 19 nt, Artificial Sequence
  Description of Artificial Sequence: Synthetic oligonucleotide
uggauuguucuccagcagu

SEQ ID NO: 1299 - RNA, 19 nt, Artificial Sequence
  Description of Artificial Sequence: Synthetic oligonucleotide
guggauuguucuccagcag

SEQ ID NO: 1300 - RNA, 19 nt, Artificial Sequence
  Description of Artificial Sequence: Synthetic oligonucleotide
cguggauuguucuccagca

SEQ ID NO: 1301 - RNA, 19 nt, Artificial Sequence
  Description of Artificial Sequence: Synthetic oligonucleotide
ccguggauuguucuccagc

SEQ ID NO: 1302 - RNA, 19 nt, Artificial Sequence
  Description of Artificial Sequence: Synthetic oligonucleotide
uccguggauuguucuccag

SEQ ID NO: 1303 - RNA, 19 nt, Artificial Sequence
  Description of Artificial Sequence: Synthetic oligonucleotide
cuccguggauuguucucca

SEQ ID NO: 1304 - RNA, 19 nt, Artificial Sequence
  Description of Artificial Sequence: Synthetic oligonucleotide
ccuccguggauuguucucc

SEQ ID NO: 1305 - RNA, 19 nt, Artificial Sequence
  Description of Artificial Sequence: Synthetic oligonucleotide
accuccguggauuguucuc

SEQ ID NO: 1306 - RNA, 19 nt, Artificial Sequence
  Description of Artificial Sequence: Synthetic oligonucleotide
uaccuccguggauuguucu

SEQ ID NO: 1307 - RNA, 19 nt, Artificial Sequence
  Description of Artificial Sequence: Synthetic oligonucleotide
guaccuccguggauuguuc

SEQ ID NO: 1308 - RNA, 19 nt, Artificial Sequence
  Description of Artificial Sequence: Synthetic oligonucleotide
gguaccuccguggauuguu

SEQ ID NO: 1309 - RNA, 19 nt, Artificial Sequence
  Description of Artificial Sequence: Synthetic oligonucleotide
ggguaccuccguggauugu

SEQ ID NO: 1310 - RNA, 19 nt, Artificial Sequence
  Description of Artificial Sequence: Synthetic oligonucleotide
ucggguaccuccguggauu

SEQ ID NO: 1311 - RNA, 19 nt, Artificial Sequence
  Description of Artificial Sequence: Synthetic oligonucleotide
uucggguaccuccguggau

SEQ ID NO: 1312 - RNA, 19 nt, Artificial Sequence
  Description of Artificial Sequence: Synthetic oligonucleotide
aaucggccuucggguaccu

SEQ ID NO: 1313 - RNA, 19 nt, Artificial Sequence
  Description of Artificial Sequence: Synthetic oligonucleotide
aaaucggccuucggguacc

SEQ ID NO: 1314 - RNA, 19 nt, Artificial Sequence
  Description of Artificial Sequence: Synthetic oligonucleotide
caaaucggccuucggguac

SEQ ID NO: 1315 - RNA, 19 nt, Artificial Sequence
  Description of Artificial Sequence: Synthetic oligonucleotide
ucaaaucggccuucgggua

SEQ ID NO: 1316 - RNA, 19 nt, Artificial Sequence
  Description of Artificial Sequence: Synthetic oligonucleotide
uucaaaucggccuucgggu

SEQ ID NO: 1317 - RNA, 19 nt, Artificial Sequence
  Description of Artificial Sequence: Synthetic oligonucleotide
cuucaaaucggccuucggg

SEQ ID NO: 1318 - RNA, 19 nt, Artificial Sequence
  Description of Artificial Sequence: Synthetic oligonucleotide
gcuucaaaucggccuucgg

SEQ ID NO: 1319 - RNA, 19 nt, Artificial Sequence
  Description of Artificial Sequence: Synthetic oligonucleotide
ugcuucaaaucggccuucg

SEQ ID NO: 1320 - RNA, 19 nt, Artificial Sequence
  Description of Artificial Sequence: Synthetic oligonucleotide
cugcuucaaaucggccuuc

SEQ ID NO: 1321 - RNA, 19 nt, Artificial Sequence
  Description of Artificial Sequence: Synthetic oligonucleotide
acugcuucaaaucggccuu

SEQ ID NO: 1322 - RNA, 19 nt, Artificial Sequence
  Description of Artificial Sequence: Synthetic oligonucleotide
cacugcuucaaaucggccu

SEQ ID NO: 1323 - RNA, 19 nt, Artificial Sequence
  Description of Artificial Sequence: Synthetic oligonucleotide
ccacugcuucaaaucggcc

SEQ ID NO: 1324 - RNA, 19 nt, Artificial Sequence
  Description of Artificial Sequence: Synthetic oligonucleotide
uccacugcuucaaaucggc

SEQ ID NO: 1325 - RNA, 19 nt, Artificial Sequence
  Description of Artificial Sequence: Synthetic oligonucleotide
guccacugcuucaaaucgg

SEQ ID NO: 1326 - RNA, 19 nt, Artificial Sequence
  Description of Artificial Sequence: Synthetic oligonucleotide
gguccacugcuucaaaucg

SEQ ID NO: 1327 - RNA, 19 nt, Artificial Sequence
  Description of Artificial Sequence: Synthetic oligonucleotide
ggguccacugcuucaaauc

SEQ ID NO: 1328 - RNA, 19 nt, Artificial Sequence
  Description of Artificial Sequence: Synthetic oligonucleotide
uggguccacugcuucaaau

SEQ ID NO: 1329 - RNA, 19 nt, Artificial Sequence
  Description of Artificial Sequence: Synthetic oligonucleotide
guggguccacugcuucaaa

SEQ ID NO: 1330 - RNA, 19 nt, Artificial Sequence
  Description of Artificial Sequence: Synthetic oligonucleotide
gguggguccacugcuucaa

SEQ ID NO: 1331 - RNA, 19 nt, Artificial Sequence
  Description of Artificial Sequence: Synthetic oligonucleotide
aaaagggcacagggugggu

SEQ ID NO: 1332 - RNA, 19 nt, Artificial Sequence
  Description of Artificial Sequence: Synthetic oligonucleotide
ugggaaaagggcacagggu

SEQ ID NO: 1333 - RNA, 19 nt, Artificial Sequence
  Description of Artificial Sequence: Synthetic oligonucleotide
augggaaaagggcacaggg

SEQ ID NO: 1334 - RNA, 19 nt, Artificial Sequence
  Description of Artificial Sequence: Synthetic oligonucleotide
uaugggaaaagggcacagg

SEQ ID NO: 1335 - RNA, 19 nt, Artificial Sequence
  Description of Artificial Sequence: Synthetic oligonucleotide
auaugggaaaagggcacag

SEQ ID NO: 1336 - RNA, 19 nt, Artificial Sequence
  Description of Artificial Sequence: Synthetic oligonucleotide
uauaugggaaaagggcaca

SEQ ID NO: 1337 - RNA, 19 nt, Artificial Sequence
  Description of Artificial Sequence: Synthetic oligonucleotide
uuauaugggaaaagggcac

SEQ ID NO: 1338 - RNA, 19 nt, Artificial Sequence
  Description of Artificial Sequence: Synthetic oligonucleotide
uuuauaugggaaaagggca

SEQ ID NO: 1339 - RNA, 19 nt, Artificial Sequence
  Description of Artificial Sequence: Synthetic oligonucleotide
guaauuuauuuuauauggg

SEQ ID NO: 1340 - DNA, 939 bp, Porcine circovirus
atgccaagcaagaaaagcggcccgcaaccccataagaggtgggtgttcacccttaataatccttccgaggaggagaaaaacaaaatacgggagcttccaatctccctttttgattattttgtttgcggagaggaaggtttggaagagggtagaactcctcacctccaggggtttgcgaattttgctaagaagcagacttttaacaaggtgaagtggtattttggtgcccgctgccacatcgagaaagcgaaaggaaccgaccagcagaataaagaatactgcagtaaagaaggccacatacttatcgagtgtggagctccgcggaaccaggggaagcgcagcgacctgtctactgctgtgagtacccttttggagacggggtctttggtgactgtagccgagcagttccctgtaacgtatgtgagaaatttccgcgggctggctgaacttttgaaagtgagcgggaagatgcagcagcgtgattggaagacagctgtacacgtcatagtgggcccgcccggttgtgggaagagccagtgggcccgtaattttgctgagcctagcgacacctactggaagcctagtagaaataagtggtgggatggatatcatggagaagaagttgttgttttggatgatttttatggctggttaccttgggatgatctactgagactgtgtgaccggtatccattgactgtagagactaaagggggtactgttccttttttggcccgcagtattttgattaccagcaatcaggccccccaggaatggtactcctcaactgctgtcccagctgtagaagctctctatcggaggattactactttgcaattttggaagactgctggagaacaatccacggaggtacccgaaggccgatttgaagcagtggacccaccctgtgcccttttcccatataaaataaattactga

SEQ ID NO: 1341 - DNA, 939 bp, Porcine circovirus
atgccaagcaagaaaagcggcccgcaaccccataagaggtgggtgttcacccttaataatccttccgaggaggagaaaaacaaaatacgggagcttccaatctccctttttgattattttgtttgcggagaggaaggtttggaagagggtagaactcctcacctccaggggtttgcgaattttgctaagaagcagacttttaacaaggtgaagtggtattttggtgcccgctgccacatcgagaaagcgaaaggaaccgaccagcagaataaagaatactgcagtaaagaaggccacatacttatcgagtgtggagctccgcggaaccaggggaagcgcagcgacctgtctactgctgtgagtacccttttggagacggggtctttggtgactgtagccgagcagtcccctgtaacgtatgtgagaaatttccgcgggctggctgaacttttgaaagtgagcgggaagatgcagcagcgtgattggaagacagctgtacacgtcatagtgggcccgcccggttgtgggaagagccagtgggcccgtaattttgctgagcctagcgacacctactggaagcctagtagaaataagtggtgggatggatatcatggagaagaagttgttgttttggatgatttttatggctggttaccttgggatgatctactgagactgtgtgaccggtatccattgactgtagagactaaagggggtactgttccttttttggcccgcagtattttgattaccagcaatcaggccccccaggaatggtactcctcaactgctgtcccagctgtagaagctctctatcggaggattactactttgcaattttggaagactgctggagaacaatccacggaggtacccgaaggccgatttgaagcagtggacccaccctgtgcccttttcccatataaaataaattactga

SEQ ID NO: 1342 - DNA, 939 bp, Porcine circovirus; identical to SEQ ID NO: 1340

SEQ ID NO: 1343 - DNA, 939 bp, Porcine circovirus
atgccaagcaagaaaagcggcccgcaaccccataagaggtgggtgttcacccttaataatccttccgaggaggagaaaaacaaaatacgggagcttccaatctccctttttgattattttgtttgcggagaggaaggtttggaagagggtagaactcctcacctccaggggtttgcgaattttgctaagaagcagacttttaacaaggtgaagtggtattttggtgcccgctgccacatcgagaaagcgaaaggaaccgaccagcagaataaagaatactgcagtaaagaaggccacatacttatcgagtgtggagctccgcggaaccaggggaagcgcagcgacctgtctactgctgtgagtacccttttggagacggggtctttggtgactgtagccgagcagttccctgtaacgtatgtgagaaatttccgcgggttggctgaacttttgaaagtgagcgggaagatgcagcagcgtgattggaagacagctgtacacgtcatagtgggcccgcccggttgtgggaagagccagtgggcccgtaattttgctgagcctagcgacacctactggaagcctagtagaaataagtggtgggatggatatcatggagaagaagttgttgttttggatgatttttatggctggttaccttgggatgatctactgagactgtgtgaccggtatccattgactgtagagactaaagggggtactgttccttttttggcccgcagtattttgattaccagcaatcaggccccccaggaatggtactcctcaactgctgtcccagctgtagaagctctctatcggaggattactactttgcaattttggaagactgctggagaacaatccacggaggtacccgaaggccgatttgaagcagtggacccaccctgtgcccttttcccatataaaataaattactga

SEQ ID NO: 1344 - DNA, 939 bp, Porcine circovirus
atgccaagcaagaaaagcggcccgcaaccccataagaggtgggtgttcacccttaataatccttccgaggaggagaaaaacaaaatacgggagcttccaatctccctttttgattattttgtttgcggagaggaaggtttggaagagggtagaactcctcacctccaggggtttgcgaattttgctaagaagcagacttttaacaaggtgaagtggtattttggtgcccgctgccacatcgagaaagcgaaaggaaccgaccaccggaataaagaatactgcagtaaagaaggccacatacttatcgagtgtggagctccgcggaaccaggggaagcgcagcgacctgtctactgctgtgagtacccttttggagacggggtctttggtgactgtagccgagcagttccctgtaacgtatgtgagaaatttccgcgggctggctgaactttagaaagtgagcgggaagatgcagcagcgtgattggaagacagctgtacacgtcatagtgggcccgcccggttgtgggaagagccagtgggcccgtaattttgctgagcctagcgacacctactggaagcctagtagaaataagtggtgggatggatatcatggagaagaagttgttgttttggatgatttttatggctggttaccttgggatgatctactagaactgtgtgaccggtatccattgactgtagagactaaaggcggtactgttccttttttggcccgcagtattttgattaccagcaatcaggccccccaggaatggtactcctcaactgctgtcccagctgtagaagctctctatcggaggattactactttgcaattttggaagactgctggagaacaatccacggaggtacccgaaggccgatttgaagcagtggacccaccctgtgcccttttcccatataaaataaattactga

SEQ ID NO: 1345 - RNA, 19 nt, Artificial Sequence
  Description of Artificial Sequence: Synthetic oligonucleotide
gagggucuuuuaggauaaa

SEQ ID NO: 1346 - RNA, 19 nt, Artificial Sequence
  Description of Artificial Sequence: Synthetic oligonucleotide
gggucuuuuaggauaaauu

SEQ ID NO: 1347 - RNA, 19 nt, Artificial Sequence
  Description of Artificial Sequence: Synthetic oligonucleotide
cucugaauuguacauaaau

SEQ ID NO: 1348 - RNA, 19 nt, Artificial Sequence
  Description of Artificial Sequence: Synthetic oligonucleotide
cagccuuaccacauaauuu

SEQ ID NO: 1349 - RNA, 19 nt, Artificial Sequence
  Description of Artificial Sequence: Synthetic oligonucleotide
cugcauuuuggagcgcaua

SEQ ID NO: 1350 - RNA, 19 nt, Artificial Sequence
  Description of Artificial Sequence: Synthetic oligonucleotide
cgacauugguguggguauu

SEQ ID NO: 1351 - RNA, 19 nt, Artificial Sequence
  Description of Artificial Sequence: Synthetic oligonucleotide
gacauugguguggguauuu

SEQ ID NO: 1352 - RNA, 19 nt, Artificial Sequence
  Description of Artificial Sequence: Synthetic oligonucleotide
cauugguguggguauuuaa

SEQ ID NO: 1353 - RNA, 19 nt, Artificial Sequence
  Description of Artificial Sequence: Synthetic oligonucleotide
gagccacagcugguuucuu

SEQ ID NO: 1354 - RNA, 19 nt, Artificial Sequence
  Description of Artificial Sequence: Synthetic oligonucleotide
gccacagcugguuucuuuu

SEQ ID NO: 1355 - RNA, 19 nt, Artificial Sequence
  Description of Artificial Sequence: Synthetic oligonucleotide
ccacagcugguuucuuuua

SEQ ID NO: 1356 - RNA, 19 nt, Artificial Sequence
  Description of Artificial Sequence: Synthetic oligonucleotide
cagcugguuucuuuuauua

SEQ ID NO: 1357 - RNA, 19 nt, Artificial Sequence
  Description of Artificial Sequence: Synthetic oligonucleotide
gcugguuucuuuuauuauu

SEQ ID NO: 1358 - RNA, 19 nt, Artificial Sequence
  Description of Artificial Sequence: Synthetic oligonucleotide
guggaaccaaucaauuguu

SEQ ID NO: 1359 - RNA, 19 nt, Artificial Sequence
  Description of Artificial Sequence: Synthetic oligonucleotide
guuugguccagcucagguu

SEQ ID NO: 1360 - RNA, 19 nt, Artificial Sequence
  Description of Artificial Sequence: Synthetic oligonucleotide
guaccuggagugguaggua

SEQ ID NO: 1361 - RNA, 19 nt, Artificial Sequence
  Description of Artificial Sequence: Synthetic oligonucleotide
ggcgggaggaguaguuaau

SEQ ID NO: 1362 - RNA, 19 nt, Artificial Sequence
  Description of Artificial Sequence: Synthetic oligonucleotide
gcgggaggaguaguuaaua

SEQ ID NO: 1363 - RNA, 19 nt, Artificial Sequence
  Description of Artificial Sequence: Synthetic oligonucleotide
cgggaggaguaguuaauau

SEQ ID NO: 1364 - RNA, 19 nt, Artificial Sequence
  Description of Artificial Sequence: Synthetic oligonucleotide
gggaggaguaguuaauaua

SEQ ID NO: 1365 - RNA, 19 nt, Artificial Sequence
  Description of Artificial Sequence: Synthetic oligonucleotide
gggguuacaaaguuggcau

SEQ ID NO: 1366 - RNA, 19 nt, Artificial Sequence
  Description of Artificial Sequence: Synthetic oligonucleotide
caaaguuggcauccaagau

SEQ ID NO: 1367 - RNA, 19 nt, Artificial Sequence
  Description of Artificial Sequence: Synthetic oligonucleotide
gacccaacaccucuuugau

SEQ ID NO: 1368 - RNA, 19 nt, Artificial Sequence
  Description of Artificial Sequence: Synthetic oligonucleotide
cucuuugauuagaggugau

SEQ ID NO: 1369 - RNA, 19 nt, Artificial Sequence
  Description of Artificial Sequence: Synthetic oligonucleotide
cauauuuagccuuucuaau

SEQ ID NO: 1370 - RNA, 19 nt, Artificial Sequence
  Description of Artificial Sequence: Synthetic oligonucleotide
cuuucuaauacgguaguau

SEQ ID NO: 1371 - RNA, 19 nt, Artificial Sequence
  Description of Artificial Sequence: Synthetic oligonucleotide
cgguaguauuggaaaggua

SEQ ID NO: 1372 - RNA, 19 nt, Artificial Sequence
  Description of Artificial Sequence: Synthetic oligonucleotide
ggaacuggccgauguugaa

SEQ ID NO: 1373 - RNA, 19 nt, Artificial Sequence
  Description of Artificial Sequence: Synthetic oligonucleotide
gaacuggccgauguugaau

SEQ ID NO: 1374 - RNA, 19 nt, Artificial Sequence
  Description of Artificial Sequence: Synthetic oligonucleotide
guugaauuugaggugguua

SEQ ID NO: 1375 - RNA, 19 nt, Artificial Sequence
  Description of Artificial Sequence: Synthetic oligonucleotide
gaggugguuaacauuccaa

SEQ ID NO: 1376 - RNA, 19 nt, Artificial Sequence
  Description of Artificial Sequence: Synthetic oligonucleotide
gugguuaacauuccaagau

SEQ ID NO: 1377 - RNA, 19 nt, Artificial Sequence
  Description of Artificial Sequence: Synthetic oligonucleotide
ccaagauggcugcgaguau

SEQ ID NO: 1378 - RNA, 19 nt, Artificial Sequence
  Description of Artificial Sequence: Synthetic oligonucleotide
gcugcgaguauccuccuuu

SEQ ID NO: 1379 - RNA, 19 nt, Artificial Sequence
  Description of Artificial Sequence: Synthetic oligonucleotide
cugcgaguauccuccuuuu

SEQ ID NO: 1380 - RNA, 19 nt, Artificial Sequence
  Description of Artificial Sequence: Synthetic oligonucleotide
gcgaguauccuccuuuuau

SEQ ID NO: 1381 - RNA, 19 nt, Artificial Sequence
  Description of Artificial Sequence: Synthetic oligonucleotide
ccuccuuuuauggugagua

SEQ ID NO: 1382 - RNA, 19 nt, Artificial Sequence
  Description of Artificial Sequence: Synthetic oligonucleotide
ccuuuuauggugaguacaa

SEQ ID NO: 1383 - RNA, 19 nt, Artificial Sequence
  Description of Artificial Sequence: Synthetic oligonucleotide
cuuuuauggugaguacaaa

SEQ ID NO: 1384 - RNA, 19 nt, Artificial Sequence
  Description of Artificial Sequence: Synthetic oligonucleotide
ggugaguacaaauucucua

SEQ ID NO: 1385 - RNA, 19 nt, Artificial Sequence
  Description of Artificial Sequence: Synthetic oligonucleotide
cucuagaaaggcgggaauu

SEQ ID NO: 1386 - RNA, 19 nt, Artificial Sequence
  Description of Artificial Sequence: Synthetic oligonucleotide
cuuucggcgccaucuguaa

SEQ ID NO: 1387 - RNA, 19 nt, Artificial Sequence
  Description of Artificial Sequence: Synthetic oligonucleotide
gcgccaucuguaacgguuu

SEQ ID NO: 1388 - RNA, 19 nt, Artificial Sequence
  Description of Artificial Sequence: Synthetic oligonucleotide
cuccggaggauguuuccaa

SEQ ID NO: 1389 - RNA, 19 nt, Artificial Sequence
  Description of Artificial Sequence: Synthetic oligonucleotide
cggaggauguuuccaagau

SEQ ID NO: 1390 - RNA, 19 nt, Artificial Sequence
  Description of Artificial Sequence: Synthetic oligonucleotide
gguccuucuucugcgguaa

SEQ ID NO: 1391 - RNA, 19 nt, Artificial Sequence
  Description of Artificial Sequence: Synthetic oligonucleotide
gccacgucauccuauaaaa

SEQ ID NO: 1392 - RNA, 19 nt, Artificial Sequence
  Description of Artificial Sequence: Synthetic oligonucleotide
gaagugcgcugcuguagua

SEQ ID NO: 1393 - RNA, 19 nt, Artificial Sequence
  Description of Artificial Sequence: Synthetic oligonucleotide
uuuauccuaaaagacccuc

SEQ ID NO: 1394 - RNA, 19 nt, Artificial Sequence
  Description of Artificial Sequence: Synthetic oligonucleotide
aauuuauccuaaaagaccc

SEQ ID NO: 1395 - RNA, 19 nt, Artificial Sequence
  Description of Artificial Sequence: Synthetic oligonucleotide
auuuauguacaauucagag

SEQ ID NO: 1396 - RNA, 19 nt, Artificial Sequence
  Description of Artificial Sequence: Synthetic oligonucleotide
aaauuaugugguaaggcug

SEQ ID NO: 1397 - RNA, 19 nt, Artificial Sequence
  Description of Artificial Sequence: Synthetic oligonucleotide
uaugcgcuccaaaaugcag

SEQ ID NO: 1398 - RNA, 19 nt, Artificial Sequence
  Description of Artificial Sequence: Synthetic oligonucleotide
aauacccacaccaaugucg

SEQ ID NO: 1399 - RNA, 19 nt, Artificial Sequence
  Description of Artificial Sequence: Synthetic oligonucleotide
aaauacccacaccaauguc

SEQ ID NO: 1400 - RNA, 19 nt, Artificial Sequence
  Description of Artificial Sequence: Synthetic oligonucleotide
uuaaauacccacaccaaug

SEQ ID NO: 1401 - RNA, 19 nt, Artificial Sequence
  Description of Artificial Sequence: Synthetic oligonucleotide
aagaaaccagcuguggcuc

SEQ ID NO: 1402 - RNA, 19 nt, Artificial Sequence
  Description of Artificial Sequence: Synthetic oligonucleotide
aaaagaaaccagcuguggc

SEQ ID NO: 1403 - RNA, 19 nt, Artificial Sequence
  Description of Artificial Sequence: Synthetic oligonucleotide
uaaaagaaaccagcugugg

SEQ ID NO: 1404 - RNA, 19 nt, Artificial Sequence
  Description of Artificial Sequence: Synthetic oligonucleotide
uaauaaaagaaaccagcug

SEQ ID NO: 1405 - RNA, 19 nt, Artificial Sequence
  Description of Artificial Sequence: Synthetic oligonucleotide
aauaauaaaagaaaccagc

SEQ ID NO: 1406 - RNA, 19 nt, Artificial Sequence
  Description of Artificial Sequence: Synthetic oligonucleotide
aacaauugauugguuccac

SEQ ID NO: 1407 - RNA, 19 nt, Artificial Sequence
  Description of Artificial Sequence: Synthetic oligonucleotide
aaccugagcuggaccaaac

SEQ ID NO: 1408 - RNA, 19 nt, Artificial Sequence
  Description of Artificial Sequence: Synthetic oligonucleotide
uaccuaccacuccagguac

SEQ ID NO: 1409 - RNA, 19 nt, Artificial Sequence
  Description of Artificial Sequence: Synthetic oligonucleotide
auuaacuacuccucccgcc

SEQ ID NO: 1410 - RNA, 19 nt, Artificial Sequence
  Description of Artificial Sequence: Synthetic oligonucleotide
uauuaacuacuccucccgc

SEQ ID NO: 1411 - RNA, 19 nt, Artificial Sequence
  Description of Artificial Sequence: Synthetic oligonucleotide
auauuaacuacuccucccg

SEQ ID NO: 1412 - RNA, 19 nt, Artificial Sequence
  Description of Artificial Sequence: Synthetic oligonucleotide
uauauuaacuacuccuccc

SEQ ID NO: 1413 - RNA, 19 nt, Artificial Sequence
  Description of Artificial Sequence: Synthetic oligonucleotide
augccaacuuuguaacccc

SEQ ID NO: 1414 - RNA, 19 nt, Artificial Sequence
  Description of Artificial Sequence: Synthetic oligonucleotide
aucuuggaugccaacuuug

SEQ ID NO: 1415 - RNA, 19 nt, Artificial Sequence
  Description of Artificial Sequence: Synthetic oligonucleotide
aucaaagagguguuggguc

SEQ ID NO: 1416 - RNA, 19 nt, Artificial Sequence
  Description of Artificial Sequence: Synthetic oligonucleotide
aucaccucuaaucaaagag

SEQ ID NO: 1417 - RNA, 19 nt, Artificial Sequence
  Description of Artificial Sequence: Synthetic oligonucleotide
auuagaaaggcuaaauaug

SEQ ID NO: 1418 - RNA, 19 nt, Artificial Sequence
  Description of Artificial Sequence: Synthetic oligonucleotide
auacuaccguauuagaaag

SEQ ID NO: 1419 - RNA, 19 nt, Artificial Sequence
  Description of Artificial Sequence: Synthetic oligonucleotide
uaccuuuccaauacuaccg

SEQ ID NO: 1420 - RNA, 19 nt, Artificial Sequence
  Description of Artificial Sequence: Synthetic oligonucleotide
uucaacaucggccaguucc

SEQ ID NO: 1421 - RNA, 19 nt, Artificial Sequence
  Description of Artificial Sequence: Synthetic oligonucleotide
auucaacaucggccaguuc

SEQ ID NO: 1422 - RNA, 19 nt, Artificial Sequence
  Description of Artificial Sequence: Synthetic oligonucleotide
uaaccaccucaaauucaac

SEQ ID NO: 1423 - RNA, 19 nt, Artificial Sequence
  Description of Artificial Sequence: Synthetic oligonucleotide
uuggaauguuaaccaccuc

SEQ ID NO: 1424 - RNA, 19 nt, Artificial Sequence
  Description of Artificial Sequence: Synthetic oligonucleotide
aucuuggaauguuaaccac

SEQ ID NO: 1425 - RNA, 19 nt, Artificial Sequence
  Description of Artificial Sequence: Synthetic oligonucleotide
auacucgcagccaucuugg

SEQ ID NO: 1426 - RNA, 19 nt, Artificial Sequence
  Description of Artificial Sequence: Synthetic oligonucleotide
aaaggaggauacucgcagc

SEQ ID NO: 1427 - RNA, 19 nt, Artificial Sequence
  Description of Artificial Sequence: Synthetic oligonucleotide
aaaaggaggauacucgcag

SEQ ID NO: 1428 - RNA, 19 nt, Artificial Sequence
  Description of Artificial Sequence: Synthetic oligonucleotide
auaaaaggaggauacucgc

SEQ ID NO: 1429 - RNA, 19 nt, Artificial Sequence
  Description of Artificial Sequence: Synthetic oligonucleotide
uacucaccauaaaaggagg

SEQ ID NO: 1430 - RNA, 19 nt, Artificial Sequence
  Description of Artificial Sequence: Synthetic oligonucleotide
uuguacucaccauaaaagg

SEQ ID NO: 1431 - RNA, 19 nt, Artificial Sequence
  Description of Artificial Sequence: Synthetic oligonucleotide
uuuguacucaccauaaaag

SEQ ID NO: 1432 - RNA, 19 nt, Artificial Sequence
  Description of Artificial Sequence: Synthetic oligonucleotide
uagagaauuuguacucacc

SEQ ID NO: 1433 - RNA, 19 nt, Artificial Sequence
  Description of Artificial Sequence: Synthetic oligonucleotide
aauucccgccuuucuagag

SEQ ID NO: 1434 - RNA, 19 nt, Artificial Sequence
  Description of Artificial Sequence: Synthetic oligonucleotide
uuacagauggcgccgaaag

SEQ ID NO: 1435 - RNA, 19 nt, Artificial Sequence
  Description of Artificial Sequence: Synthetic oligonucleotide
aaaccguuacagauggcgc

SEQ ID NO: 1436 - RNA, 19 nt, Artificial Sequence
  Description of Artificial Sequence: Synthetic oligonucleotide
uuggaaacauccuccggag

SEQ ID NO: 1437 - RNA, 19 nt, Artificial Sequence
  Description of Artificial Sequence: Synthetic oligonucleotide
aucuuggaaacauccuccg

SEQ ID NO: 1438 - RNA, 19 nt, Artificial Sequence
  Description of Artificial Sequence: Synthetic oligonucleotide
uuaccgcagaagaaggacc

SEQ ID NO: 1439 - RNA, 19 nt, Artificial Sequence
  Description of Artificial Sequence: Synthetic oligonucleotide
uuuuauaggaugacguggc

SEQ ID NO: 1440 - RNA, 19 nt, Artificial Sequence
  Description of Artificial Sequence: Synthetic oligonucleotide
uacuacagcagcgcacuuc

SEQ ID NO: 1441 - protein, 16 aa, Artificial Sequence
  Description of Artificial Sequence: Synthetic peptide
AAVALLPAVLLALLAP

SEQ ID NO: 1442 - protein, 11 aa, Artificial Sequence
  Description of Artificial Sequence: Synthetic peptide
AALLPVLLAAP

SEQ ID NO: 1443 - protein, 13 aa, Human immunodeficiency virus
GRKKRRQRRRPPQ

SEQ ID NO: 1444 - protein, 16 aa, Drosophila sp.
RQIKIWFQNRRMKWKK

SEQ ID NO: 1445 - RNA, 19 nt, Artificial Sequence
  Description of Artificial Sequence: Synthetic oligonucleotide
aucuggcuagcuacuauuc

SEQ ID NO: 1446 - RNA, 19 nt, Artificial Sequence
  Description of Artificial Sequence: Synthetic oligonucleotide
gcuagcuacuauucuacag

SEQ ID NO: 1447 - RNA, 19 nt, Artificial Sequence
  Description of Artificial Sequence: Synthetic oligonucleotide
ugcuuuccggauuacuuag

SEQ ID NO: 1448 - RNA, 19 nt, Artificial Sequence
  Description of Artificial Sequence: Synthetic oligonucleotide
gcuuuccggauuacuuaga

SEQ ID NO: 1449 - RNA, 19 nt, Artificial Sequence
  Description of Artificial Sequence: Synthetic oligonucleotide
uccggauuacuuagauucc

SEQ ID NO: 1450 - RNA, 19 nt, Artificial Sequence
  Description of Artificial Sequence: Synthetic oligonucleotide
ccggauuacuuagauuccc

SEQ ID NO: 1451 - RNA, 19 nt, Artificial Sequence
  Description of Artificial Sequence: Synthetic oligonucleotide
guauaucuacgaaggcgac

SEQ ID NO: 1452 - RNA, 19 nt, Artificial Sequence
  Description of Artificial Sequence: Synthetic oligonucleotide
uauaucuacgaaggcgacg

SEQ ID NO: 1453 - RNA, 19 nt, Artificial Sequence
  Description of Artificial Sequence: Synthetic oligonucleotide
auaucuacgaaggcgacga

SEQ ID NO: 1454 - RNA, 19 nt, Artificial Sequence
  Description of Artificial Sequence: Synthetic oligonucleotide
uaucuacgaaggcgacgaa

SEQ ID NO: 1455 - RNA, 19 nt, Artificial Sequence
  Description of Artificial Sequence: Synthetic oligonucleotide
acgaacccuacaucguucu

SEQ ID NO: 1456 - RNA, 19 nt, Artificial Sequence
  Description of Artificial Sequence: Synthetic oligonucleotide
gaacccuacaucguucuaa

SEQ ID NO: 1457 - RNA, 19 nt, Artificial Sequence
  Description of Artificial Sequence: Synthetic oligonucleotide
aacccuacaucguucuaaa

SEQ ID NO: 1458 - RNA, 19 nt, Artificial Sequence
  Description of Artificial Sequence: Synthetic oligonucleotide
accaauuggagucgucaac

SEQ ID NO: 1459 - RNA, 19 nt, Artificial Sequence
  Description of Artificial Sequence: Synthetic oligonucleotide
ccaauuggagucgucaacu

SEQ ID NO: 1460 - RNA, 19 nt, Artificial Sequence
  Description of Artificial Sequence: Synthetic oligonucleotide
caauuggagucgucaacuu

SEQ ID NO: 1461 - RNA, 19 nt, Artificial Sequence
  Description of Artificial Sequence: Synthetic oligonucleotide
cacuuucacuuacccuaua

SEQ ID NO: 1462 - RNA, 19 nt, Artificial Sequence
  Description of Artificial Sequence: Synthetic oligonucleotide
acuuucacuuacccuauac

SEQ ID NO: 1463 - RNA, 19 nt, Artificial Sequence
  Description of Artificial Sequence: Synthetic oligonucleotide
uacaccaccgucaauuggu

SEQ ID NO: 1464 - RNA, 19 nt, Artificial Sequence
  Description of Artificial Sequence: Synthetic oligonucleotide
cuauggagauucgcuucac

SEQ ID NO: 1465 - RNA, 19 nt, Artificial Sequence
  Description of Artificial Sequence: Synthetic oligonucleotide
gccggagugaaacuaaaua

SEQ ID NO: 1466 - RNA, 19 nt, Artificial Sequence
  Description of Artificial Sequence: Synthetic oligonucleotide
augguuggcccgacuauua

SEQ ID NO: 1467 - RNA, 19 nt, Artificial Sequence
  Description of Artificial Sequence: Synthetic oligonucleotide
cgacuauuacggucgaaac

SEQ ID NO: 1468 - RNA, 19 nt, Artificial Sequence
  Description of Artificial Sequence: Synthetic oligonucleotide
gacuauuacggucgaaaca

SEQ ID NO: 1469 - RNA, 19 nt, Artificial Sequence
  Description of Artificial Sequence: Synthetic oligonucleotide
acuauuacggucgaaacau

SEQ ID NO: 1470 - RNA, 19 nt, Artificial Sequence
  Description of Artificial Sequence: Synthetic oligonucleotide
cuauuacggucgaaacauc

SEQ ID NO: 1471 - RNA, 19 nt, Artificial Sequence
  Description of Artificial Sequence: Synthetic oligonucleotide
uauuacggucgaaacauca

SEQ ID NO: 1472 - RNA, 19 nt, Artificial Sequence
  Description of Artificial Sequence: Synthetic oligonucleotide
cuuuggcgagguuagugaa

SEQ ID NO: 1473 - RNA, 19 nt, Artificial Sequence
  Description of Artificial Sequence: Synthetic oligonucleotide
uuuggcgagguuagugaag

SEQ ID NO: 1474 - RNA, 19 nt, Artificial Sequence
  Description of Artificial Sequence: Synthetic oligonucleotide
aacuguuguuccuuaccgu

SEQ ID NO: 1475 - RNA, 19 nt, Artificial Sequence
  Description of Artificial Sequence: Synthetic oligonucleotide
cgcuaagaacucuacaaua

SEQ ID NO: 1476 - RNA, 19 nt, Artificial Sequence
  Description of Artificial Sequence: Synthetic oligonucleotide
agguaauuucuacgucgga

SEQ ID NO: 1477 - RNA, 19 nt, Artificial Sequence
  Description of Artificial Sequence: Synthetic oligonucleotide
auuucuacgucggaggcaa

SEQ ID NO: 1478 - RNA, 19 nt, Artificial Sequence
  Description of Artificial Sequence: Synthetic oligonucleotide
uacgucggaggcaacuuua

SEQ ID NO: 1479 - RNA, 19 nt, Artificial Sequence
  Description of Artificial Sequence: Synthetic oligonucleotide
uacccaacaagguaacgug

SEQ ID NO: 1480 - RNA, 19 nt, Artificial Sequence
  Description of Artificial Sequence: Synthetic oligonucleotide
agguaacgugguugucuau

SEQ ID NO: 1481 - RNA, 19 nt, Artificial Sequence
  Description of Artificial Sequence: Synthetic oligonucleotide
uggugguaacuauccuauu

SEQ ID NO: 1482 - RNA, 19 nt, Artificial Sequence
  Description of Artificial Sequence: Synthetic oligonucleotide
auguuacugaauuuccggc

SEQ ID NO: 1483 - RNA, 19 nt, Artificial Sequence
  Description of Artificial Sequence: Synthetic oligonucleotide
uguuacugaauuuccggca

SEQ ID NO: 1484 - RNA, 19 nt, Artificial Sequence
  Description of Artificial Sequence: Synthetic oligonucleotide
guuacugaauuuccggcag

SEQ ID NO: 1485 - RNA, 19 nt, Artificial Sequence
  Description of Artificial Sequence: Synthetic oligonucleotide
uuacugaauuuccggcagc

SEQ ID NO: 1486 - RNA, 19 nt, Artificial Sequence
  Description of Artificial Sequence: Synthetic oligonucleotide
ccacgagucuacaauucac

SEQ ID NO: 1487 - RNA, 19 nt, Artificial Sequence
  Description of Artificial Sequence: Synthetic oligonucleotide
uugcacaagauguguacga

SEQ ID NO: 1488 - RNA, 19 nt, Artificial Sequence
  Description of Artificial Sequence: Synthetic oligonucleotide
cugguaacugguucgauau

SEQ ID NO: 1489 - RNA, 19 nt, Artificial Sequence
  Description of Artificial Sequence: Synthetic oligonucleotide
ugguaacugguucgauauu

SEQ ID NO: 1490 - RNA, 19 nt, Artificial Sequence
  Description of Artificial Sequence: Synthetic oligonucleotide
gguaacugguucgauauug

SEQ ID NO: 1491 - RNA, 19 nt, Artificial Sequence
  Description of Artificial Sequence: Synthetic oligonucleotide
guaacugguucgauauugg

SEQ ID NO: 1492 - RNA, 19 nt, Artificial Sequence
  Description of Artificial Sequence: Synthetic oligonucleotide
uaacugguucgauauuggc

SEQ ID NO: 1493 - RNA, 19 nt, Artificial Sequence
  Description of Artificial Sequence: Synthetic oligonucleotide
aacugguucgauauuggca

SEQ ID NO: 1494 - RNA, 19 nt, Artificial Sequence
  Description of Artificial Sequence: Synthetic oligonucleotide
gguucgauauuggcauauc

SEQ ID NO: 1495 - RNA, 19 nt, Artificial Sequence
  Description of Artificial Sequence: Synthetic oligonucleotide
guucgauauuggcauaucg

SEQ ID NO: 1496 - RNA, 19 nt, Artificial Sequence
  Description of Artificial Sequence: Synthetic oligonucleotide
uucgauauuggcauaucgu

SEQ ID NO: 1497 - RNA, 19 nt, Artificial Sequence
  Description of Artificial Sequence: Synthetic oligonucleotide
ucgauauuggcauaucgug

SEQ ID NO: 1498 - RNA, 19 nt, Artificial Sequence
  Description of Artificial Sequence: Synthetic oligonucleotide
cgauauuggcauaucgugu

SEQ ID NO: 1499 - RNA, 19 nt, Artificial Sequence
  Description of Artificial Sequence: Synthetic oligonucleotide
auauuggcauaucguguga

SEQ ID NO: 1500 - RNA, 19 nt, Artificial Sequence
  Description of Artificial Sequence: Synthetic oligonucleotide
gaauaguagcuagccagau

SEQ ID NO: 1501 - RNA, 19 nt, Artificial Sequence
  Description of Artificial Sequence: Synthetic oligonucleotide
cuguagaauaguagcuagc

SEQ ID NO: 1502 - RNA, 19 nt, Artificial Sequence
  Description of Artificial Sequence: Synthetic oligonucleotide
cuaaguaauccggaaagca

SEQ ID NO: 1503 - RNA, 19 nt, Artificial Sequence
  Description of Artificial Sequence: Synthetic oligonucleotide
ucuaaguaauccggaaagc

SEQ ID NO: 1504 - RNA, 19 nt, Artificial Sequence
  Description of Artificial Sequence: Synthetic oligonucleotide
ggaaucuaaguaauccgga

SEQ ID NO: 1505 - RNA, 19 nt, Artificial Sequence
  Description of Artificial Sequence: Synthetic oligonucleotide
gggaaucuaaguaauccgg

SEQ ID NO: 1506 - RNA, 19 nt, Artificial Sequence
  Description of Artificial Sequence: Synthetic oligonucleotide
gucgccuucguagauauac

SEQ ID NO: 1507 - RNA, 19 nt, Artificial Sequence
  Description of Artificial Sequence: Synthetic oligonucleotide
cgucgccuucguagauaua

SEQ ID NO: 1508 - RNA, 19 nt, Artificial Sequence
  Description of Artificial Sequence: Synthetic oligonucleotide
ucgucgccuucguagauau

SEQ ID NO: 1509 - RNA, 19 nt, Artificial Sequence
  Description of Artificial Sequence: Synthetic oligonucleotide
uucgucgccuucguagaua

SEQ ID NO: 1510 - RNA, 19 nt, Artificial Sequence
  Description of Artificial Sequence: Synthetic oligonucleotide
agaacgauguaggguucgu

SEQ ID NO: 1511 - RNA, 19 nt, Artificial Sequence
  Description of Artificial Sequence: Synthetic oligonucleotide
uuagaacgauguaggguuc

SEQ ID NO: 1512 - RNA, 19 nt, Artificial Sequence
  Description of Artificial Sequence: Synthetic oligonucleotide
uuuagaacgauguaggguu

SEQ ID NO: 1513 - RNA, 19 nt, Artificial Sequence
  Description of Artificial Sequence: Synthetic oligonucleotide
guugacgacuccaauuggu

SEQ ID NO: 1514 - RNA, 19 nt, Artificial Sequence
  Description of Artificial Sequence: Synthetic oligonucleotide
aguugacgacuccaauugg

SEQ ID NO: 1515 - RNA, 19 nt, Artificial Sequence
  Description of Artificial Sequence: Synthetic oligonucleotide
aaguugacgacuccaauug

SEQ ID NO: 1516 - RNA, 19 nt, Artificial Sequence
  Description of Artificial Sequence: Synthetic oligonucleotide
uauaggguaagugaaagug

SEQ ID NO: 1517 - RNA, 19 nt, Artificial Sequence
  Description of Artificial Sequence: Synthetic oligonucleotide
guauaggguaagugaaagu

SEQ ID NO: 1518 - RNA, 19 nt, Artificial Sequence
  Description of Artificial Sequence: Synthetic oligonucleotide
accaauugacgguggugua

SEQ ID NO: 1519 - RNA, 19 nt, Artificial Sequence
  Description of Artificial Sequence: Synthetic oligonucleotide
gugaagcgaaucuccauag

SEQ ID NO: 1520 - RNA, 19 nt, Artificial Sequence
  Description of Artificial Sequence: Synthetic oligonucleotide
uauuuaguuucacuccggc

SEQ ID NO: 1521 - RNA, 19 nt, Artificial Sequence
  Description of Artificial Sequence: Synthetic oligonucleotide
uaauagucgggccaaccau

SEQ ID NO: 1522 - RNA, 19 nt, Artificial Sequence
  Description of Artificial Sequence: Synthetic oligonucleotide
guuucgaccguaauagucg

SEQ ID NO: 1523 - RNA, 19 nt, Artificial Sequence
  Description of Artificial Sequence: Synthetic oligonucleotide
uguuucgaccguaauaguc

SEQ ID NO: 1524 - RNA, 19 nt, Artificial Sequence
  Description of Artificial Sequence: Synthetic oligonucleotide
auguuucgaccguaauagu

SEQ ID NO: 1525 - RNA, 19 nt, Artificial Sequence
  Description of Artificial Sequence: Synthetic oligonucleotide
gauguuucgaccguaauag

SEQ ID NO: 1526 - RNA, 19 nt, Artificial Sequence
  Description of Artificial Sequence: Synthetic oligonucleotide
ugauguuucgaccguaaua

SEQ ID NO: 1527 - RNA, 19 nt, Artificial Sequence
  Description of Artificial Sequence: Synthetic oligonucleotide
uucacuaaccucgccaaag

SEQ ID NO: 1528 - RNA, 19 nt, Artificial Sequence
  Description of Artificial Sequence: Synthetic oligonucleotide
cuucacuaaccucgccaaa

SEQ ID NO: 1529 - RNA, 19 nt, Artificial Sequence
  Description of Artificial Sequence: Synthetic oligonucleotide
acgguaaggaacaacaguu

SEQ ID NO: 1530 - RNA, 19 nt, Artificial Sequence
  Description of Artificial Sequence: Synthetic oligonucleotide
uauuguagaguucuuagcg

SEQ ID NO: 1531 - RNA, 19 nt, Artificial Sequence
  Description of Artificial Sequence: Synthetic oligonucleotide
uccgacguagaaauuaccu

SEQ ID NO: 1532 - RNA, 19 nt, Artificial Sequence
  Description of Artificial Sequence: Synthetic oligonucleotide
uugccuccgacguagaaau

SEQ ID NO: 1533 - RNA, 19 nt, Artificial Sequence
  Description of Artificial Sequence: Synthetic oligonucleotide
uaaaguugccuccgacgua

SEQ ID NO: 1534 - RNA, 19 nt, Artificial Sequence
  Description of Artificial Sequence: Synthetic oligonucleotide
cacguuaccuuguugggua

SEQ ID NO: 1535 - RNA, 19 nt, Artificial Sequence
  Description of Artificial Sequence: Synthetic oligonucleotide
auagacaaccacguuaccu

SEQ ID NO: 1536 - RNA, 19 nt, Artificial Sequence
  Description of Artificial Sequence: Synthetic oligonucleotide
aauaggauaguuaccacca

SEQ ID NO: 1537 - RNA, 19 nt, Artificial Sequence
  Description of Artificial Sequence: Synthetic oligonucleotide
gccggaaauucaguaacau

SEQ ID NO: 1538 - RNA, 19 nt, Artificial Sequence
  Description of Artificial Sequence: Synthetic oligonucleotide
ugccggaaauucaguaaca

SEQ ID NO: 1539 - RNA, 19 nt, Artificial Sequence
  Description of Artificial Sequence: Synthetic oligonucleotide
cugccggaaauucaguaac

SEQ ID NO: 1540 - RNA, 19 nt, Artificial Sequence
  Description of Artificial Sequence: Synthetic oligonucleotide
gcugccggaaauucaguaa

SEQ ID NO: 1541 - RNA, 19 nt, Artificial Sequence
  Description of Artificial Sequence: Synthetic oligonucleotide
gugaauuguagacucgugg

SEQ ID NO: 1542 - RNA, 19 nt, Artificial Sequence
  Description of Artificial Sequence: Synthetic oligonucleotide
ucguacacaucuugugcaa

SEQ ID NO: 1543 - RNA, 19 nt, Artificial Sequence
  Description of Artificial Sequence: Synthetic oligonucleotide
auaucgaaccaguuaccag

SEQ ID NO: 1544 - RNA, 19 nt, Artificial Sequence
  Description of Artificial Sequence: Synthetic oligonucleotide
aauaucgaaccaguuacca

SEQ ID NO: 1545 - RNA, 19 nt, Artificial Sequence
  Description of Artificial Sequence: Synthetic oligonucleotide
caauaucgaaccaguuacc

SEQ ID NO: 1546 - RNA, 19 nt, Artificial Sequence
  Description of Artificial Sequence: Synthetic oligonucleotide
ccaauaucgaaccaguuac

SEQ ID NO: 1547 - RNA, 19 nt, Artificial Sequence
  Description of Artificial Sequence: Synthetic oligonucleotide
gccaauaucgaaccaguua

SEQ ID NO: 1548 - RNA, 19 nt, Artificial Sequence
  Description of Artificial Sequence: Synthetic oligonucleotide
ugccaauaucgaaccaguu

SEQ ID NO: 1549 - RNA, 19 nt, Artificial Sequence
  Description of Artificial Sequence: Synthetic oligonucleotide
gauaugccaauaucgaacc

SEQ ID NO: 1550 - RNA, 19 nt, Artificial Sequence
  Description of Artificial Sequence: Synthetic oligonucleotide
cgauaugccaauaucgaac

SEQ ID NO: 1551 - RNA, 19 nt, Artificial Sequence
  Description of Artificial Sequence: Synthetic oligonucleotide
acgauaugccaauaucgaa

SEQ ID NO: 1552 - RNA, 19 nt, Artificial Sequence
  Description of Artificial Sequence: Synthetic oligonucleotide
cacgauaugccaauaucga

SEQ ID NO: 1553 - RNA, 19 nt, Artificial Sequence
  Description of Artificial Sequence: Synthetic oligonucleotide
acacgauaugccaauaucg

SEQ ID NO: 1554 - RNA, 19 nt, Artificial Sequence
  Description of Artificial Sequence: Synthetic oligonucleotide
ucacacgauaugccaauau

SEQ ID NO: 1555 - RNA, 19 nt, Artificial Sequence
  Description of Artificial Sequence: Synthetic oligonucleotide
cguuuugcuccaaaggacu

SEQ ID NO: 1556 - RNA, 19 nt, Artificial Sequence
  Description of Artificial Sequence: Synthetic oligonucleotide
cagaaaguagcaaucauca

SEQ ID NO: 1557 - RNA, 19 nt, Artificial Sequence
  Description of Artificial Sequence: Synthetic oligonucleotide
gcagcagcuagauuaugga

SEQ ID NO: 1558 - RNA, 19 nt, Artificial Sequence
  Description of Artificial Sequence: Synthetic oligonucleotide
cagcuagauuauggagugu

SEQ ID NO: 1559 - RNA, 19 nt, Artificial Sequence
  Description of Artificial Sequence: Synthetic oligonucleotide
cgaagaauuuaaccgugcu

SEQ ID NO: 1560 - RNA, 19 nt, Artificial Sequence
  Description of Artificial Sequence: Synthetic oligonucleotide
gaagaauuuaaccgugcua

SEQ ID NO: 1561 - RNA, 19 nt, Artificial Sequence
  Description of Artificial Sequence: Synthetic oligonucleotide
guaggauucacggaagcuu

SEQ ID NO: 1562 - RNA, 19 nt, Artificial Sequence
  Description of Artificial Sequence: Synthetic oligonucleotide
gaugacaggaacaccuaca

SEQ ID NO: 1563 - RNA, 19 nt, Artificial Sequence
  Description of Artificial Sequence: Synthetic oligonucleotide
cuacaagugcuacagccaa

SEQ ID NO: 1564 - RNA, 19 nt, Artificial Sequence
  Description of Artificial Sequence: Synthetic oligonucleotide
cuccauggauaaauucgga

SEQ ID NO: 1565 - RNA, 19 nt, Artificial Sequence
  Description of Artificial Sequence: Synthetic oligonucleotide
ccauggauaaauucggauu

SEQ ID NO: 1566 - RNA, 19 nt, Artificial Sequence
  Description of Artificial Sequence: Synthetic oligonucleotide
gauaaauucggauuucggu

SEQ ID NO: 1567 - RNA, 19 nt, Artificial Sequence
  Description of Artificial Sequence: Synthetic oligonucleotide
ggauuucgguuacccuaca

SEQ ID NO: 1568 - RNA, 19 nt, Artificial Sequence
  Description of Artificial Sequence: Synthetic oligonucleotide
gauuucgguuacccuacaa

SEQ ID NO: 1569 - RNA, 19 nt, Artificial Sequence
  Description of Artificial Sequence: Synthetic oligonucleotide
cgguuacccuacaaucagu

SEQ ID NO: 1570 - RNA, 19 nt, Artificial Sequence
  Description of Artificial Sequence: Synthetic oligonucleotide
caguauuuuggaggugugu

SEQ ID NO: 1571 - RNA, 19 nt, Artificial Sequence
  Description of Artificial Sequence: Synthetic oligonucleotide
guauuuuggaggugugucu

SEQ ID NO: 1572 - RNA, 19 nt, Artificial Sequence
  Description of Artificial Sequence: Synthetic oligonucleotide
cugccuugagcaaagaaca

SEQ ID NO: 1573 - RNA, 19 nt, Artificial Sequence
  Description of Artificial Sequence: Synthetic oligonucleotide
gcaaagaacaauucacgaa

SEQ ID NO: 1574 - RNA, 19 nt, Artificial Sequence
  Description of Artificial Sequence: Synthetic oligonucleotide
gaacaauucacgaagauca

SEQ ID NO: 1575 - RNA, 19 nt, Artificial Sequence
  Description of Artificial Sequence: Synthetic oligonucleotide
caauggguucccaaacaau

SEQ ID NO: 1576 - RNA, 19 nt, Artificial Sequence
  Description of Artificial Sequence: Synthetic oligonucleotide
gcugucauugggaaaugca

SEQ ID NO: 1577 - RNA, 19 nt, Artificial Sequence
  Description of Artificial Sequence: Synthetic oligonucleotide
ggagagguuugaccguauu

SEQ ID NO: 1578 - RNA, 19 nt, Artificial Sequence
  Description of Artificial Sequence: Synthetic oligonucleotide
gaucacaguggauaucgga

SEQ ID NO: 1579 - RNA, 19 nt, Artificial Sequence
  Description of Artificial Sequence: Synthetic oligonucleotide
aguccuuuggagcaaaacg

SEQ ID NO: 1580 - RNA, 19 nt, Artificial Sequence
  Description of Artificial Sequence: Synthetic oligonucleotide
ugaugauugcuacuuucug

SEQ ID NO: 1581 - RNA, 19 nt, Artificial Sequence
  Description of Artificial Sequence: Synthetic oligonucleotide
uccauaaucuagcugcugc

SEQ ID NO: 1582 - RNA, 19 nt, Artificial Sequence
  Description of Artificial Sequence: Synthetic oligonucleotide
acacuccauaaucuagcug

SEQ ID NO: 1583 - RNA, 19 nt, Artificial Sequence
  Description of Artificial Sequence: Synthetic oligonucleotide
agcacgguuaaauucuucg

SEQ ID NO: 1584 - RNA, 19 nt, Artificial Sequence
  Description of Artificial Sequence: Synthetic oligonucleotide
uagcacgguuaaauucuuc

SEQ ID NO: 1585 - RNA, 19 nt, Artificial Sequence
  Description of Artificial Sequence: Synthetic oligonucleotide
aagcuuccgugaauccuac

SEQ ID NO: 1586 - RNA, 19 nt, Artificial Sequence
  Description of Artificial Sequence: Synthetic oligonucleotide
uguagguguuccugucauc

SEQ ID NO: 1587 - RNA, 19 nt, Artificial Sequence
  Description of Artificial Sequence: Synthetic oligonucleotide
uuggcuguagcacuuguag

SEQ ID NO: 1588 - RNA, 19 nt, Artificial Sequence
  Description of Artificial Sequence: Synthetic oligonucleotide
uccgaauuuauccauggag

SEQ ID NO: 1589 - RNA, 19 nt, Artificial Sequence
  Description of Artificial Sequence: Synthetic oligonucleotide
aauccgaauuuauccaugg

SEQ ID NO: 1590 - RNA, 19 nt, Artificial Sequence
  Description of Artificial Sequence: Synthetic oligonucleotide
accgaaauccgaauuuauc

SEQ ID NO: 1591 - RNA, 19 nt, Artificial Sequence
  Description of Artificial Sequence: Synthetic oligonucleotide
uguaggguaaccgaaaucc

SEQ ID NO: 1592 - RNA, 19 nt, Artificial Sequence
  Description of Artificial Sequence: Synthetic oligonucleotide
uuguaggguaaccgaaauc

SEQ ID NO: 1593 - RNA, 19 nt, Artificial Sequence
  Description of Artificial Sequence: Synthetic oligonucleotide
acugauuguaggguaaccg

SEQ ID NO: 1594 - RNA, 19 nt, Artificial Sequence
  Description of Artificial Sequence: Synthetic oligonucleotide
acacaccuccaaaauacug

SEQ ID NO: 1595 - RNA, 19 nt, Artificial Sequence
  Description of Artificial Sequence: Synthetic oligonucleotide
agacacaccuccaaaauac

SEQ ID NO: 1596 - RNA, 19 nt, Artificial Sequence
  Description of Artificial Sequence: Synthetic oligonucleotide
uguucuuugcucaaggcag

SEQ ID NO: 1597 - RNA, 19 nt, Artificial Sequence
  Description of Artificial Sequence: Synthetic oligonucleotide
uucgugaauuguucuuugc

SEQ ID NO: 1598 - RNA, 19 nt, Artificial Sequence
  Description of Artificial Sequence: Synthetic oligonucleotide
ugaucuucgugaauuguuc

SEQ ID NO: 1599 - RNA, 19 nt, Artificial Sequence
  Description of Artificial Sequence: Synthetic oligonucleotide
auuguuugggaacccauug

SEQ ID NO: 1600 - RNA, 19 nt, Artificial Sequence
  Description of Artificial Sequence: Synthetic oligonucleotide
ugcauuucccaaugacagc

SEQ ID NO: 1601 - RNA, 19 nt, Artificial Sequence
  Description of Artificial Sequence: Synthetic oligonucleotide
aauacggucaaaccucucc

SEQ ID NO: 1602 - RNA, 19 nt, Artificial Sequence
  Description of Artificial Sequence: Synthetic oligonucleotide
uccgauauccacugugauc

SEQ ID NO: 1603 - RNA, 19 nt, Artificial Sequence
  Description of Artificial Sequence: Synthetic oligonucleotide
cggcauagcaaauacauau

SEQ ID NO: 1604 - RNA, 19 nt, Artificial Sequence
  Description of Artificial Sequence: Synthetic oligonucleotide
gguauaauguugagagaaa

SEQ ID NO: 1605 - RNA, 19 nt, Artificial Sequence
  Description of Artificial Sequence: Synthetic oligonucleotide
cacaugaucagauuguaua

SEQ ID NO: 1606 - RNA, 19 nt, Artificial Sequence
  Description of Artificial Sequence: Synthetic oligonucleotide
cagauuguauacuaacaaa

SEQ ID NO: 1607 - RNA, 19 nt, Artificial Sequence
  Description of Artificial Sequence: Synthetic oligonucleotide
gacuguguugcucaaacaa

SEQ ID NO: 1608 - RNA, 19 nt, Artificial Sequence
  Description of Artificial Sequence: Synthetic oligonucleotide
cuuacaugagaggccuuau

SEQ ID NO: 1609 - RNA, 19 nt, Artificial Sequence
  Description of Artificial Sequence: Synthetic oligonucleotide
caugagaggccuuauugau

SEQ ID NO: 1610 - RNA, 19 nt, Artificial Sequence
  Description of Artificial Sequence: Synthetic oligonucleotide
gaggccuuauugauguaaa

SEQ ID NO: 1611 - RNA, 19 nt, Artificial Sequence
  Description of Artificial Sequence: Synthetic oligonucleotide
gagugaaauuaguuuugau

SEQ ID NO: 1612 - RNA, 19 nt, Artificial Sequence
  Description of Artificial Sequence: Synthetic oligonucleotide
caucauuccuuuucguaau

SEQ ID NO: 1613 - RNA, 19 nt, Artificial Sequence
  Description of Artificial Sequence: Synthetic oligonucleotide
ggcaucugauaccgauguu

SEQ ID NO: 1614 - RNA, 19 nt, Artificial Sequence
  Description of Artificial Sequence: Synthetic oligonucleotide
gacagguacacaaccuuuu

SEQ ID NO: 1615 - RNA, 19 nt, Artificial Sequence
  Description of Artificial Sequence: Synthetic oligonucleotide
caaccuuuuaaucgugcaa

SEQ ID NO: 1616 - RNA, 19 nt, Artificial Sequence
  Description of Artificial Sequence: Synthetic oligonucleotide
cugaaaaugaccgaaauua

SEQ ID NO: 1617 - RNA, 19 nt, Artificial Sequence
  Description of Artificial Sequence: Synthetic oligonucleotide
gaccgaaauuauuacggau

SEQ ID NO: 1618 - RNA, 19 nt, Artificial Sequence
  Description of Artificial Sequence: Synthetic oligonucleotide
ggagaaaugccacgucauu

SEQ ID NO: 1619 - RNA, 19 nt, Artificial Sequence
  Description of Artificial Sequence: Synthetic oligonucleotide
gacugacaguggaacaauu

SEQ ID NO: 1620 - RNA, 19 nt, Artificial Sequence
  Description of Artificial Sequence: Synthetic oligonucleotide
caagaagauuaauggauuu

SEQ ID NO: 1621 - RNA, 19 nt, Artificial Sequence
  Description of Artificial Sequence: Synthetic oligonucleotide
cuaugcuggauacaacgua

SEQ ID NO: 1622 - RNA, 19 nt, Artificial Sequence
  Description of Artificial Sequence: Synthetic oligonucleotide
gcuggauacaacguaacaa

SEQ ID NO: 1623 - RNA, 19 nt, Artificial Sequence
  Description of Artificial Sequence: Synthetic oligonucleotide
gagggagacuuagggaaau

SEQ ID NO: 1624 - RNA, 19 nt, Artificial Sequence
  Description of Artificial Sequence: Synthetic oligonucleotide
cagagaacgucaguauauu

SEQ ID NO: 1625 - RNA, 19 nt, Artificial Sequence
  Description of Artificial Sequence: Synthetic oligonucleotide
cuugucaguagauuguaua

SEQ ID NO: 1626 - RNA, 19 nt, Artificial Sequence
  Description of Artificial Sequence: Synthetic oligonucleotide
gcuccuauuagagacuauu

SEQ ID NO: 1627 - RNA, 19 nt, Artificial Sequence
  Description of Artificial Sequence: Synthetic oligonucleotide
auauguauuugcuaugccg

SEQ ID NO: 1628 - RNA, 19 nt, Artificial Sequence
  Description of Artificial Sequence: Synthetic oligonucleotide
uuucucucaacauuauacc

SEQ ID NO: 1629 - RNA, 19 nt, Artificial Sequence
  Description of Artificial Sequence: Synthetic oligonucleotide
uauacaaucugaucaugug

SEQ ID NO: 1630 - RNA, 19 nt, Artificial Sequence
  Description of Artificial Sequence: Synthetic oligonucleotide
uuuguuaguauacaaucug

SEQ ID NO: 1631 - RNA, 19 nt, Artificial Sequence
  Description of Artificial Sequence: Synthetic oligonucleotide
uuguuugagcaacacaguc

SEQ ID NO: 1632 - RNA, 19 nt, Artificial Sequence
  Description of Artificial Sequence: Synthetic oligonucleotide
auaaggccucucauguaag

SEQ ID NO: 1633 - RNA, 19 nt, Artificial Sequence
  Description of Artificial Sequence: Synthetic oligonucleotide
aucaauaaggccucucaug

SEQ ID NO: 1634 - RNA, 19 nt, Artificial Sequence
  Description of Artificial Sequence: Synthetic oligonucleotide
uuuacaucaauaaggccuc

SEQ ID NO: 1635 - RNA, 19 nt, Artificial Sequence
  Description of Artificial Sequence: Synthetic oligonucleotide
aucaaaacuaauuucacuc

SEQ ID NO: 1636 - RNA, 19 nt, Artificial Sequence
  Description of Artificial Sequence: Synthetic oligonucleotide
auuacgaaaaggaaugaug

SEQ ID NO: 1637 - RNA, 19 nt, Artificial Sequence
  Description of Artificial Sequence: Synthetic oligonucleotide
aacaucgguaucagaugcc

SEQ ID NO: 1638 - RNA, 19 nt, Artificial Sequence
  Description of Artificial Sequence: Synthetic oligonucleotide
aaaagguuguguaccuguc

SEQ ID NO: 1639 - RNA, 19 nt, Artificial Sequence
  Description of Artificial Sequence: Synthetic oligonucleotide
uugcacgauuaaaagguug

SEQ ID NO: 1640 - RNA, 19 nt, Artificial Sequence
  Description of Artificial Sequence: Synthetic oligonucleotide
uaauuucggucauuuucag

SEQ ID NO: 1641 - RNA, 19 nt, Artificial Sequence
  Description of Artificial Sequence: Synthetic oligonucleotide
auccguaauaauuucgguc

SEQ ID NO: 1642 - RNA, 19 nt, Artificial Sequence
  Description of Artificial Sequence: Synthetic oligonucleotide
aaugacguggcauuucucc

SEQ ID NO: 1643 - RNA, 19 nt, Artificial Sequence
  Description of Artificial Sequence: Synthetic oligonucleotide
aauuguuccacugucaguc

SEQ ID NO: 1644 - RNA, 19 nt, Artificial Sequence
  Description of Artificial Sequence: Synthetic oligonucleotide
aaauccauuaaucuucuug

SEQ ID NO: 1645 - RNA, 19 nt, Artificial Sequence
  Description of Artificial Sequence: Synthetic oligonucleotide
uacguuguauccagcauag

SEQ ID NO: 1646 - RNA, 19 nt, Artificial Sequence
  Description of Artificial Sequence: Synthetic oligonucleotide
uuguuacguuguauccagc

SEQ ID NO: 1647 - RNA, 19 nt, Artificial Sequence
  Description of Artificial Sequence: Synthetic oligonucleotide
auuucccuaagucucccuc

SEQ ID NO: 1648 - RNA, 19 nt, Artificial Sequence
  Description of Artificial Sequence: Synthetic oligonucleotide
aauauacugacguucucug

SEQ ID NO: 1649 - RNA, 19 nt, Artificial Sequence
  Description of Artificial Sequence: Synthetic oligonucleotide
uauacaaucuacugacaag

SEQ ID NO: 1650 - RNA, 19 nt, Artificial Sequence
  Description of Artificial Sequence: Synthetic oligonucleotide
aauagucucuaauaggagc

SEQ ID NO: 1651 - RNA, 19 nt, Artificial Sequence
  Description of Artificial Sequence: Synthetic oligonucleotide
cacaguguguggguaucua

SEQ ID NO: 1652 - RNA, 19 nt, Artificial Sequence
  Description of Artificial Sequence: Synthetic oligonucleotide
guggguaucuacagaccau

SEQ ID NO: 1653 - RNA, 19 nt, Artificial Sequence
  Description of Artificial Sequence: Synthetic oligonucleotide
guuucuuaaccaucaucau

SEQ ID NO: 1654 - RNA, 19 nt, Artificial Sequence
  Description of Artificial Sequence: Synthetic oligonucleotide
ccaucaucaugaggucgau

SEQ ID NO: 1655 - RNA, 19 nt, Artificial Sequence
  Description of Artificial Sequence: Synthetic oligonucleotide
guagcaaaucugauucaaa

SEQ ID NO: 1656 - RNA, 19 nt, Artificial Sequence
  Description of Artificial Sequence: Synthetic oligonucleotide
gauucaaaaggagggcuuu

SEQ ID NO: 1657 - RNA, 19 nt, Artificial Sequence
  Description of Artificial Sequence: Synthetic oligonucleotide
cuacuugcagggugguaaa

SEQ ID NO: 1658 - RNA, 19 nt, Artificial Sequence
  Description of Artificial Sequence: Synthetic oligonucleotide
gugguaaaauggccuacua

SEQ ID NO: 1659 - RNA, 19 nt, Artificial Sequence
  Description of Artificial Sequence: Synthetic oligonucleotide
caguguggauauugauaua

SEQ ID NO: 1660 - RNA, 19 nt, Artificial Sequence
  Description of Artificial Sequence: Synthetic oligonucleotide
guggauauugauauagaua

SEQ ID NO: 1661 - RNA, 19 nt, Artificial Sequence
  Description of Artificial Sequence: Synthetic oligonucleotide
gcaaagaguauugagcuuu

SEQ ID NO: 1662 - RNA, 19 nt, Artificial Sequence
  Description of Artificial Sequence: Synthetic oligonucleotide
gaguauugagcuuuggaua

SEQ ID NO: 1663 - RNA, 19 nt, Artificial Sequence
  Description of Artificial Sequence: Synthetic oligonucleotide
guauugagcuuuggauauu

SEQ ID NO: 1664 - RNA, 19 nt, Artificial Sequence
  Description of Artificial Sequence: Synthetic oligonucleotide
gcuauugguuugcaguguu

SEQ ID NO: 1665 - RNA, 19 nt, Artificial Sequence
  Description of Artificial Sequence: Synthetic oligonucleotide
cugacaaauggucgcauuu

SEQ ID NO: 1666 - RNA, 19 nt, Artificial Sequence
  Description of Artificial Sequence: Synthetic oligonucleotide
gacaaauggucgcauuuau

SEQ ID NO: 1667 - RNA, 19 nt, Artificial Sequence
  Description of Artificial Sequence: Synthetic oligonucleotide
gaaauggucuccuacgauu

SEQ ID NO: 1668 - RNA, 19 nt, Artificial Sequence
  Description of Artificial Sequence: Synthetic oligonucleotide
ccuacgauuauagagauau

SEQ ID NO: 1669 - RNA, 19 nt, Artificial Sequence
  Description of Artificial Sequence: Synthetic oligonucleotide
cuacgauuauagagauauu

SEQ ID NO: 1670 - RNA, 19 nt, Artificial Sequence
  Description of Artificial Sequence: Synthetic oligonucleotide
gagauauuguugguaucaa

SEQ ID NO: 1671 - RNA, 19 nt, Artificial Sequence
  Description of Artificial Sequence: Synthetic oligonucleotide
guugguaucaaucuauuaa

SEQ ID NO: 1672 - RNA, 19 nt, Artificial Sequence
  Description of Artificial Sequence: Synthetic oligonucleotide
gcugggauguauagcagaa

SEQ ID NO: 1673 - RNA, 19 nt, Artificial Sequence
  Description of Artificial Sequence: Synthetic oligonucleotide
gcagaaguuaaugcaacaa

SEQ ID NO: 1674 - RNA, 19 nt, Artificial Sequence
  Description of Artificial Sequence: Synthetic oligonucleotide
gcuggaaagagguugcuua

SEQ ID NO: 1675 - RNA, 19 nt, Artificial Sequence
  Description of Artificial Sequence: Synthetic oligonucleotide
uagauacccacacacugug

SEQ ID NO: 1676 - RNA, 19 nt, Artificial Sequence
  Description of Artificial Sequence: Synthetic oligonucleotide
auggucuguagauacccac

SEQ ID NO: 1677 - RNA, 19 nt, Artificial Sequence
  Description of Artificial Sequence: Synthetic oligonucleotide
augaugaugguuaagaaac

SEQ ID NO: 1678 - RNA, 19 nt, Artificial Sequence
  Description of Artificial Sequence: Synthetic oligonucleotide
aucgaccucaugaugaugg

SEQ ID NO: 1679 - RNA, 19 nt, Artificial Sequence
  Description of Artificial Sequence: Synthetic oligonucleotide
uuugaaucagauuugcuac

SEQ ID NO: 1680 - RNA, 19 nt, Artificial Sequence
  Description of Artificial Sequence: Synthetic oligonucleotide
aaagcccuccuuuugaauc

SEQ ID NO: 1681 - RNA, 19 nt, Artificial Sequence
  Description of Artificial Sequence: Synthetic oligonucleotide
uuuaccacccugcaaguag

SEQ ID NO: 1682 - RNA, 19 nt, Artificial Sequence
  Description of Artificial Sequence: Synthetic oligonucleotide
uaguaggccauuuuaccac

SEQ ID NO: 1683 - RNA, 19 nt, Artificial Sequence
  Description of Artificial Sequence: Synthetic oligonucleotide
uauaucaauauccacacug

SEQ ID NO: 1684 - RNA, 19 nt, Artificial Sequence
  Description of Artificial Sequence: Synthetic oligonucleotide
uaucuauaucaauauccac

SEQ ID NO: 1685 - RNA, 19 nt, Artificial Sequence
  Description of Artificial Sequence: Synthetic oligonucleotide
aaagcucaauacucuuugc

SEQ ID NO: 1686 - RNA, 19 nt, Artificial Sequence
  Description of Artificial Sequence: Synthetic oligonucleotide
uauccaaagcucaauacuc

SEQ ID NO: 1687 - RNA, 19 nt, Artificial Sequence
  Description of Artificial Sequence: Synthetic oligonucleotide
aauauccaaagcucaauac

SEQ ID NO: 1688 - RNA, 19 nt, Artificial Sequence
  Description of Artificial Sequence: Synthetic oligonucleotide
aacacugcaaaccaauagc

SEQ ID NO: 1689 - RNA, 19 nt, Artificial Sequence
  Description of Artificial Sequence: Synthetic oligonucleotide
aaaugcgaccauuugucag

SEQ ID NO: 1690 - RNA, 19 nt, Artificial Sequence
  Description of Artificial Sequence: Synthetic oligonucleotide
auaaaugcgaccauuuguc

SEQ ID NO: 1691 - RNA, 19 nt, Artificial Sequence
  Description of Artificial Sequence: Synthetic oligonucleotide
aaucguaggagaccauuuc

SEQ ID NO: 1692 - RNA, 19 nt, Artificial Sequence
  Description of Artificial Sequence: Synthetic oligonucleotide
auaucucuauaaucguagg

SEQ ID NO: 1693 - RNA, 19 nt, Artificial Sequence
  Description of Artificial Sequence: Synthetic oligonucleotide
aauaucucuauaaucguag

SEQ ID NO: 1694 - RNA, 19 nt, Artificial Sequence
  Description of Artificial Sequence: Synthetic oligonucleotide
uugauaccaacaauaucuc

SEQ ID NO: 1695 - RNA, 19 nt, Artificial Sequence
  Description of Artificial Sequence: Synthetic oligonucleotide
uuaauagauugauaccaac

SEQ ID NO: 1696 - RNA, 19 nt, Artificial Sequence
  Description of Artificial Sequence: Synthetic oligonucleotide
uucugcuauacaucccagc

SEQ ID NO: 1697 - RNA, 19 nt, Artificial Sequence
  Description of Artificial Sequence: Synthetic oligonucleotide
uuguugcauuaacuucugc

SEQ ID NO: 1698 - RNA, 19 nt, Artificial Sequence
  Description of Artificial Sequence: Synthetic oligonucleotide
uaagcaaccucuuuccagc

SEQ ID NO: 1699 - RNA, 19 nt, Artificial Sequence
  Description of Artificial Sequence: Synthetic oligonucleotide
guaacacuuaucgcaugau

SEQ ID NO: 1700 - RNA, 19 nt, Artificial Sequence
  Description of Artificial Sequence: Synthetic oligonucleotide
cgccugaaaccugacauaa

SEQ ID NO: 1701 - RNA, 19 nt, Artificial Sequence
  Description of Artificial Sequence: Synthetic oligonucleotide
ggaccauugacgacucuau

SEQ ID NO: 1702 - RNA, 19 nt, Artificial Sequence
  Description of Artificial Sequence: Synthetic oligonucleotide
cauugacgacucuauuaga

SEQ ID NO: 1703 - RNA, 19 nt, Artificial Sequence
  Description of Artificial Sequence: Synthetic oligonucleotide
cacuuguucuauuccccaa

SEQ ID NO: 1704 - RNA, 19 nt, Artificial Sequence
  Description of Artificial Sequence: Synthetic oligonucleotide
cugguuguaugauugguaa

SEQ ID NO: 1705 - RNA, 19 nt, Artificial Sequence
  Description of Artificial Sequence: Synthetic oligonucleotide
gaauuuugaaguuccuuaa

SEQ ID NO: 1706 - RNA, 19 nt, Artificial Sequence
  Description of Artificial Sequence: Synthetic oligonucleotide
cgaguagcaauugucagua

SEQ ID NO: 1707 - RNA, 19 nt, Artificial Sequence
  Description of Artificial Sequence: Synthetic oligonucleotide
gagguggaaucauucacca

SEQ ID NO: 1708 - RNA, 19 nt, Artificial Sequence
  Description of Artificial Sequence: Synthetic oligonucleotide
ccucuggaauagcauuaca

SEQ ID NO: 1709 - RNA, 19 nt, Artificial Sequence
  Description of Artificial Sequence: Synthetic oligonucleotide
cuaagaaacugcaugacga

SEQ ID NO: 1710 - RNA, 19 nt, Artificial Sequence
  Description of Artificial Sequence: Synthetic oligonucleotide
gguggucucaaaucuagca

SEQ ID NO: 1711 - RNA, 19 nt, Artificial Sequence
  Description of Artificial Sequence: Synthetic oligonucleotide
gauuauacuacccguagaa

SEQ ID NO: 1712 - RNA, 19 nt, Artificial Sequence
  Description of Artificial Sequence: Synthetic oligonucleotide
cccguagaauauacuaggu

SEQ ID NO: 1713 - RNA, 19 nt, Artificial Sequence
  Description of Artificial Sequence: Synthetic oligonucleotide
gcauuuccuaauugaggua

SEQ ID NO: 1714 - RNA, 19 nt, Artificial Sequence
  Description of Artificial Sequence: Synthetic oligonucleotide
gacuuggaggauacgguua

SEQ ID NO: 1715 - RNA, 19 nt, Artificial Sequence
  Description of Artificial Sequence: Synthetic oligonucleotide
guacauaugaguauaaaga

SEQ ID NO: 1716 - RNA, 19 nt, Artificial Sequence
  Description of Artificial Sequence: Synthetic oligonucleotide
cacauucaagguauucauu

SEQ ID NO: 1717 - RNA, 19 nt, Artificial Sequence
  Description of Artificial Sequence: Synthetic oligonucleotide
ccuuggagcaacuaaccuu

SEQ ID NO: 1718 - RNA, 19 nt, Artificial Sequence
  Description of Artificial Sequence: Synthetic oligonucleotide
caacuaaccuuaaaggcuu

SEQ ID NO: 1719 - RNA, 19 nt, Artificial Sequence
  Description of Artificial Sequence: Synthetic oligonucleotide
ggcuugccuuguuaagaca

SEQ ID NO: 1720 - RNA, 19 nt, Artificial Sequence
  Description of Artificial Sequence: Synthetic oligonucleotide
gccuuguuaagacauaguu

SEQ ID NO: 1721 - RNA, 19 nt, Artificial Sequence
  Description of Artificial Sequence: Synthetic oligonucleotide
cuggcauuuaacaaccuaa

SEQ ID NO: 1722 - RNA, 19 nt, Artificial Sequence
  Description of Artificial Sequence: Synthetic oligonucleotide
gccccauaguaaggauaua

SEQ ID NO: 1723 - RNA, 19 nt, Artificial Sequence
  Description of Artificial Sequence: Synthetic oligonucleotide
aucaugcgauaaguguuac

SEQ ID NO: 1724 - RNA, 19 nt, Artificial Sequence
  Description of Artificial Sequence: Synthetic oligonucleotide
uuaugucagguuucaggcg

SEQ ID NO: 1725 - RNA, 19 nt, Artificial Sequence
  Description of Artificial Sequence: Synthetic oligonucleotide
auagagucgucaauggucc

SEQ ID NO: 1726 - RNA, 19 nt, Artificial Sequence
  Description of Artificial Sequence: Synthetic oligonucleotide
ucuaauagagucgucaaug

SEQ ID NO: 1727 - RNA, 19 nt, Artificial Sequence
  Description of Artificial Sequence: Synthetic oligonucleotide
uuggggaauagaacaagug

SEQ ID NO: 1728 - RNA, 19 nt, Artificial Sequence
  Description of Artificial Sequence: Synthetic oligonucleotide
uuaccaaucauacaaccag

SEQ ID NO: 1729 - RNA, 19 nt, Artificial Sequence
  Description of Artificial Sequence: Synthetic oligonucleotide
uuaaggaacuucaaaauuc

SEQ ID NO: 1730 - RNA, 19 nt, Artificial Sequence
  Description of Artificial Sequence: Synthetic oligonucleotide
uacugacaauugcuacucg

SEQ ID NO: 1731 - RNA, 19 nt, Artificial Sequence
  Description of Artificial Sequence: Synthetic oligonucleotide
uggugaaugauuccaccuc

SEQ ID NO: 1732 - RNA, 19 nt, Artificial Sequence
  Description of Artificial Sequence: Synthetic oligonucleotide
uguaaugcuauuccagagg

SEQ ID NO: 1733 - RNA, 19 nt, Artificial Sequence
  Description of Artificial Sequence: Synthetic oligonucleotide
ucgucaugcaguuucuuag

SEQ ID NO: 1734 - RNA, 19 nt, Artificial Sequence
  Description of Artificial Sequence: Synthetic oligonucleotide
ugcuagauuugagaccacc

SEQ ID NO: 1735 - RNA, 19 nt, Artificial Sequence
  Description of Artificial Sequence: Synthetic oligonucleotide
uucuacggguaguauaauc

SEQ ID NO: 1736 - RNA, 19 nt, Artificial Sequence
  Description of Artificial Sequence: Synthetic oligonucleotide
accuaguauauucuacggg

SEQ ID NO: 1737 - RNA, 19 nt, Artificial Sequence
  Description of Artificial Sequence: Synthetic oligonucleotide
uaccucaauuaggaaaugc

SEQ ID NO: 1738 - RNA, 19 nt, Artificial Sequence
  Description of Artificial Sequence: Synthetic oligonucleotide
uaaccguauccuccaaguc

SEQ ID NO: 1739 - RNA, 19 nt, Artificial Sequence
  Description of Artificial Sequence: Synthetic oligonucleotide
ucuuuauacucauauguac

SEQ ID NO: 1740 - RNA, 19 nt, Artificial Sequence
  Description of Artificial Sequence: Synthetic oligonucleotide
aaugaauaccuugaaugug

SEQ ID NO: 1741 - RNA, 19 nt, Artificial Sequence
  Description of Artificial Sequence: Synthetic oligonucleotide
aagguuaguugcuccaagg

SEQ ID NO: 1742 - RNA, 19 nt, Artificial Sequence
  Description of Artificial Sequence: Synthetic oligonucleotide
aagccuuuaagguuaguug

SEQ ID NO: 1743 - RNA, 19 nt, Artificial Sequence
  Description of Artificial Sequence: Synthetic oligonucleotide
ugucuuaacaaggcaagcc

SEQ ID NO: 1744 - RNA, 19 nt, Artificial Sequence
  Description of Artificial Sequence: Synthetic oligonucleotide
aacuaugucuuaacaaggc

SEQ ID NO: 1745 - RNA, 19 nt, Artificial Sequence
  Description of Artificial Sequence: Synthetic oligonucleotide
uuagguuguuaaaugccag

SEQ ID NO: 1746 - RNA, 19 nt, Artificial Sequence
  Description of Artificial Sequence: Synthetic oligonucleotide
uauauccuuacuauggggc

SEQ ID NO: 1747 - RNA, 19 nt, Artificial Sequence
  Description of Artificial Sequence: Synthetic oligonucleotide
ggcgcagagcucuacuuuu

SEQ ID NO: 1748 - RNA, 19 nt, Artificial Sequence
  Description of Artificial Sequence: Synthetic oligonucleotide
ggcaucuuggcuagagaau

SEQ ID NO: 1749 - RNA, 19 nt, Artificial Sequence
  Description of Artificial Sequence: Synthetic oligonucleotide
gggaagucuggcaagguua

SEQ ID NO: 1750 - RNA, 19 nt, Artificial Sequence
  Description of Artificial Sequence: Synthetic oligonucleotide
gaagucuggcaagguuaau

SEQ ID NO: 1751 - RNA, 19 nt, Artificial Sequence
  Description of Artificial Sequence: Synthetic oligonucleotide
caagguuaauaacaucuuu

SEQ ID NO: 1752 - RNA, 19 nt, Artificial Sequence
  Description of Artificial Sequence: Synthetic oligonucleotide
gucccaaggaauugcuaaa

SEQ ID NO: 1753 - RNA, 19 nt, Artificial Sequence
  Description of Artificial Sequence: Synthetic oligonucleotide
cuaaaauuaaguguuccau

SEQ ID NO: 1754 - RNA, 19 nt, Artificial Sequence
  Description of Artificial Sequence: Synthetic oligonucleotide
guacgcuguccaaaacaau

SEQ ID NO: 1755 - RNA, 19 nt, Artificial Sequence
  Description of Artificial Sequence: Synthetic oligonucleotide
cuuuuguggcucuuagcaa

SEQ ID NO: 1756 - RNA, 19 nt, Artificial Sequence
  Description of Artificial Sequence: Synthetic oligonucleotide
cagucuaccaggugacgua

SEQ ID NO: 1757 - RNA, 19 nt, Artificial Sequence
  Description of Artificial Sequence: Synthetic oligonucleotide
caggugacguaccaguuaa

SEQ ID NO: 1758 - RNA, 19 nt, Artificial Sequence
  Description of Artificial Sequence: Synthetic oligonucleotide
cguuauguacaguccucau

SEQ ID NO: 1759 - RNA, 19 nt, Artificial Sequence
  Description of Artificial Sequence: Synthetic oligonucleotide
ggagcagaauccauggcua

SEQ ID NO: 1760 - RNA, 19 nt, Artificial Sequence
  Description of Artificial Sequence: Synthetic oligonucleotide
gaauccauggcuaggguuu

SEQ ID NO: 1761 - RNA, 19 nt, Artificial Sequence
  Description of Artificial Sequence: Synthetic oligonucleotide
ggccauaacuauugcugua

SEQ ID NO: 1762 - RNA, 19 nt, Artificial Sequence
  Description of Artificial Sequence: Synthetic oligonucleotide
cuguacucuguucgggauu

SEQ ID NO: 1763 - RNA, 19 nt, Artificial Sequence
  Description of Artificial Sequence: Synthetic oligonucleotide
cuuugguuggcguguacau

SEQ ID NO: 1764 - RNA, 19 nt, Artificial Sequence
  Description of Artificial Sequence: Synthetic oligonucleotide
cagauaacgguuaccuuua

SEQ ID NO: 1765 - RNA, 19 nt, Artificial Sequence
  Description of Artificial Sequence: Synthetic oligonucleotide
ccuggugugcguuucuauu

SEQ ID NO: 1766 - RNA, 19 nt, Artificial Sequence
  Description of Artificial Sequence: Synthetic oligonucleotide
cguuucuauuuacuucuau

SEQ ID NO: 1767 - RNA, 19 nt, Artificial Sequence
  Description of Artificial Sequence: Synthetic oligonucleotide
cagcccucagagacuaaaa

SEQ ID NO: 1768 - RNA, 19 nt, Artificial Sequence
  Description of Artificial Sequence: Synthetic oligonucleotide
cuugaaaauggacaggcaa

SEQ ID NO: 1769 - RNA, 19 nt, Artificial Sequence
  Description of Artificial Sequence: Synthetic oligonucleotide
gccuuaagcuauuuucgaa

SEQ ID NO: 1770 - RNA, 19 nt, Artificial Sequence
  Description of Artificial Sequence: Synthetic oligonucleotide
ggauagauuaaaagcggaa

SEQ ID NO: 1771 - RNA, 19 nt, Artificial Sequence
  Description of Artificial Sequence: Synthetic oligonucleotide
aaaaguagagcucugcgcc

SEQ ID NO: 1772 - RNA, 19 nt, Artificial Sequence
  Description of Artificial Sequence: Synthetic oligonucleotide
auucucuagccaagaugcc

SEQ ID NO: 1773 - RNA, 19 nt, Artificial Sequence
  Description of Artificial Sequence: Synthetic oligonucleotide
uaaccuugccagacuuccc

SEQ ID NO: 1774 - RNA, 19 nt, Artificial Sequence
  Description of Artificial Sequence: Synthetic oligonucleotide
auuaaccuugccagacuuc

SEQ ID NO: 1775 - RNA, 19 nt, Artificial Sequence
  Description of Artificial Sequence: Synthetic oligonucleotide
aaagauguuauuaaccuug

SEQ ID NO: 1776 - RNA, 19 nt, Artificial Sequence
  Description of Artificial Sequence: Synthetic oligonucleotide
uuuagcaauuccuugggac

SEQ ID NO: 1777 - RNA, 19 nt, Artificial Sequence
  Description of Artificial Sequence: Synthetic oligonucleotide
auggaacacuuaauuuuag

SEQ ID NO: 1778 - RNA, 19 nt, Artificial Sequence
  Description of Artificial Sequence: Synthetic oligonucleotide
auuguuuuggacagcguac

SEQ ID NO: 1779 - RNA, 19 nt, Artificial Sequence
  Description of Artificial Sequence: Synthetic oligonucleotide
uugcuaagagccacaaaag

SEQ ID NO: 1780 - RNA, 19 nt, Artificial Sequence
  Description of Artificial Sequence: Synthetic oligonucleotide
uacgucaccugguagacug

SEQ ID NO: 1781 - RNA, 19 nt, Artificial Sequence
  Description of Artificial Sequence: Synthetic oligonucleotide
uuaacugguacgucaccug

SEQ ID NO: 1782 - RNA, 19 nt, Artificial Sequence
  Description of Artificial Sequence: Synthetic oligonucleotide
augaggacuguacauaacg

SEQ ID NO: 1783 - RNA, 19 nt, Artificial Sequence
  Description of Artificial Sequence: Synthetic oligonucleotide
uagccauggauucugcucc

SEQ ID NO: 1784 - RNA, 19 nt, Artificial Sequence
  Description of Artificial Sequence: Synthetic oligonucleotide
aaacccuagccauggauuc

SEQ ID NO: 1785 - RNA, 19 nt, Artificial Sequence
  Description of Artificial Sequence: Synthetic oligonucleotide
uacagcaauaguuauggcc

SEQ ID NO: 1786 - RNA, 19 nt, Artificial Sequence
  Description of Artificial Sequence: Synthetic oligonucleotide
aaucccgaacagaguacag

SEQ ID NO: 1787 - RNA, 19 nt, Artificial Sequence
  Description of Artificial Sequence: Synthetic oligonucleotide
auguacacgccaaccaaag

SEQ ID NO: 1788 - RNA, 19 nt, Artificial Sequence
  Description of Artificial Sequence: Synthetic oligonucleotide
uaaagguaaccguuaucug

SEQ ID NO: 1789 - RNA, 19 nt, Artificial Sequence
  Description of Artificial Sequence: Synthetic oligonucleotide
aauagaaacgcacaccagg

SEQ ID NO: 1790 - RNA, 19 nt, Artificial Sequence
  Description of Artificial Sequence: Synthetic oligonucleotide
auagaaguaaauagaaacg

SEQ ID NO: 1791 - RNA, 19 nt, Artificial Sequence
  Description of Artificial Sequence: Synthetic oligonucleotide
uuuuagucucugagggcug

SEQ ID NO: 1792 - RNA, 19 nt, Artificial Sequence
  Description of Artificial Sequence: Synthetic oligonucleotide
uugccuguccauuuucaag

SEQ ID NO: 1793 - RNA, 19 nt, Artificial Sequence
  Description of Artificial Sequence: Synthetic oligonucleotide
uucgaaaauagcuuaaggc

SEQ ID NO: 1794 - RNA, 19 nt, Artificial Sequence
  Description of Artificial Sequence: Synthetic oligonucleotide
uuccgcuuuuaaucuaucc

SEQ ID NO: 1795 - RNA, 19 nt, Artificial Sequence
  Description of Artificial Sequence: Synthetic oligonucleotide
acagaggaggucuuucgaa

SEQ ID NO: 1796 - RNA, 19 nt, Artificial Sequence
  Description of Artificial Sequence: Synthetic oligonucleotide
gucuuucgaagcuauguuu

SEQ ID NO: 1797 - RNA, 19 nt, Artificial Sequence
  Description of Artificial Sequence: Synthetic oligonucleotide
uuuccaucuccaccaucag

SEQ ID NO: 1798 - RNA, 19 nt, Artificial Sequence
  Description of Artificial Sequence: Synthetic oligonucleotide
aucuccaccaucaggaaca

SEQ ID NO: 1799 - RNA, 19 nt, Artificial Sequence
  Description of Artificial Sequence: Synthetic oligonucleotide
accaucaggaacaagagac

SEQ ID NO: 1800 - RNA, 19 nt, Artificial Sequence
  Description of Artificial Sequence: Synthetic oligonucleotide
accccgagauggacaauuu

SEQ ID NO: 1801 - RNA, 19 nt, Artificial Sequence
  Description of Artificial Sequence: Synthetic oligonucleotide
gauggacaauuugcuccua

SEQ ID NO: 1802 - RNA, 19 nt, Artificial Sequence
  Description of Artificial Sequence: Synthetic oligonucleotide
caauuugcuccuagaaccc

SEQ ID NO: 1803 - RNA, 19 nt, Artificial Sequence
  Description of Artificial Sequence: Synthetic oligonucleotide
agaacccaacagcaucuug

SEQ ID NO: 1804 - RNA, 19 nt, Artificial Sequence
  Description of Artificial Sequence: Synthetic oligonucleotide
gcagcuugcuaucauugga

SEQ ID NO: 1805 - RNA, 19 nt, Artificial Sequence
  Description of Artificial Sequence: Synthetic oligonucleotide
gcuaucauuggagaugaca

SEQ ID NO: 1806 - RNA, 19 nt, Artificial Sequence
  Description of Artificial Sequence: Synthetic oligonucleotide
augacauuaaccggagaua

SEQ ID NO: 1807 - RNA, 19 nt, Artificial Sequence
  Description of Artificial Sequence: Synthetic oligonucleotide
uuaaccggagauacgacac

SEQ ID NO: 1808 - RNA, 19 nt, Artificial Sequence
  Description of Artificial Sequence: Synthetic oligonucleotide
gauacgacacagaguucca

SEQ ID NO: 1809 - RNA, 19 nt, Artificial Sequence
  Description of Artificial Sequence: Synthetic oligonucleotide
aguuccagaauuuacugga

SEQ ID NO: 1810 - RNA, 19 nt, Artificial Sequence
  Description of Artificial Sequence: Synthetic oligonucleotide
auuuacuggagcagcugca

SEQ ID NO: 1811 - RNA, 19 nt, Artificial Sequence
  Description of Artificial Sequence: Synthetic oligonucleotide
ggaaugccuacgaacucuu

SEQ ID NO: 1812 - RNA, 19 nt, Artificial Sequence
  Description of Artificial Sequence: Synthetic oligonucleotide
acgaacucuucaccaagau

SEQ ID NO: 1813 - RNA, 19 nt, Artificial Sequence
  Description of Artificial Sequence: Synthetic oligonucleotide
cucuucaccaagauugccu

SEQ ID NO: 1814 - RNA, 19 nt, Artificial Sequence
  Description of Artificial Sequence: Synthetic oligonucleotide
agauugccuccagccuauu

SEQ ID NO: 1815 - RNA, 19 nt, Artificial Sequence
  Description of Artificial Sequence: Synthetic oligonucleotide
gccuauuuaagagcggcau

SEQ ID NO: 1816 - RNA, 19 nt, Artificial Sequence
  Description of Artificial Sequence: Synthetic oligonucleotide
ccuguaugucuaccaacgu

SEQ ID NO: 1817 - RNA, 19 nt, Artificial Sequence
  Description of Artificial Sequence: Synthetic oligonucleotide
augucuaccaacgugguuu

SEQ ID NO: 1818 - RNA, 19 nt, Artificial Sequence
  Description of Artificial Sequence: Synthetic oligonucleotide
uuuuggcggauaucauacu

SEQ ID NO: 1819 - RNA, 19 nt, Artificial Sequence
  Description of Artificial Sequence: Synthetic oligonucleotide
gauaucauacugcaccauu

SEQ ID NO: 1820 - RNA, 19 nt, Artificial Sequence
  Description of Artificial Sequence: Synthetic oligonucleotide
auacugcaccauugcaucg

SEQ ID NO: 1821 - RNA, 19 nt, Artificial Sequence
  Description of Artificial Sequence: Synthetic oligonucleotide
agacccaauccugauugug

SEQ ID NO: 1822 - RNA, 19 nt, Artificial Sequence
  Description of Artificial Sequence: Synthetic oligonucleotide
ccugauugugaugacaauu

SEQ ID NO: 1823 - RNA, 19 nt, Artificial Sequence
  Description of Artificial Sequence: Synthetic oligonucleotide
gaugacaauucuuggugug

SEQ ID NO: 1824 - RNA, 19 nt, Artificial Sequence
  Description of Artificial Sequence: Synthetic oligonucleotide
ucuuggugugguucuguug

SEQ ID NO: 1825 - RNA, 19 nt, Artificial Sequence
  Description of Artificial Sequence: Synthetic oligonucleotide
cgugguacacagauucuuc

SEQ ID NO: 1826 - RNA, 19 nt, Artificial Sequence
  Description of Artificial Sequence: Synthetic oligonucleotide
uucuucagaucaugacucc

SEQ ID NO: 1827 - RNA, 19 nt, Artificial Sequence
  Description of Artificial Sequence: Synthetic oligonucleotide
uucgaaagaccuccucugu

SEQ ID NO: 1828 - RNA, 19 nt, Artificial Sequence
  Description of Artificial Sequence: Synthetic oligonucleotide
aaacauagcuucgaaagac

SEQ ID NO: 1829 - RNA, 19 nt, Artificial Sequence
  Description of Artificial Sequence: Synthetic oligonucleotide
cugaugguggagauggaaa

SEQ ID NO: 1830 - RNA, 19 nt, Artificial Sequence
  Description of Artificial Sequence: Synthetic oligonucleotide
uguuccugaugguggagau

SEQ ID NO: 1831 - RNA, 19 nt, Artificial Sequence
  Description of Artificial Sequence: Synthetic oligonucleotide
gucucuuguuccugauggu

SEQ ID NO: 1832 - RNA, 19 nt, Artificial Sequence
  Description of Artificial Sequence: Synthetic oligonucleotide
aaauuguccaucucggggu

SEQ ID NO: 1833 - RNA, 19 nt, Artificial Sequence
  Description of Artificial Sequence: Synthetic oligonucleotide
uaggagcaaauuguccauc

SEQ ID NO: 1834 - RNA, 19 nt, Artificial Sequence
  Description of Artificial Sequence: Synthetic oligonucleotide
ggguucuaggagcaaauug

SEQ ID NO: 1835 - RNA, 19 nt, Artificial Sequence
  Description of Artificial Sequence: Synthetic oligonucleotide
caagaugcuguuggguucu

SEQ ID NO: 1836 - RNA, 19 nt, Artificial Sequence
  Description of Artificial Sequence: Synthetic oligonucleotide
uccaaugauagcaagcugc

SEQ ID NO: 1837 - RNA, 19 nt, Artificial Sequence
  Description of Artificial Sequence: Synthetic oligonucleotide
ugucaucuccaaugauagc

SEQ ID NO: 1838 - RNA, 19 nt, Artificial Sequence
  Description of Artificial Sequence: Synthetic oligonucleotide
uaucuccgguuaaugucau

SEQ ID NO: 1839 - RNA, 19 nt, Artificial Sequence
  Description of Artificial Sequence: Synthetic oligonucleotide
gugucguaucuccgguuaa

SEQ ID NO: 1840 - RNA, 19 nt, Artificial Sequence
  Description of Artificial Sequence: Synthetic oligonucleotide
uggaacucugugucguauc

SEQ ID NO: 1841 - RNA, 19 nt, Artificial Sequence
  Description of Artificial Sequence: Synthetic oligonucleotide
uccaguaaauucuggaacu

SEQ ID NO: 1842 - RNA, 19 nt, Artificial Sequence
  Description of Artificial Sequence: Synthetic oligonucleotide
ugcagcugcuccaguaaau

SEQ ID NO: 1843 - RNA, 19 nt, Artificial Sequence
  Description of Artificial Sequence: Synthetic oligonucleotide
aagaguucguaggcauucc

SEQ ID NO: 1844 - RNA, 19 nt, Artificial Sequence
  Description of Artificial Sequence: Synthetic oligonucleotide
aucuuggugaagaguucgu

SEQ ID NO: 1845 - RNA, 19 nt, Artificial Sequence
  Description of Artificial Sequence: Synthetic oligonucleotide
aggcaaucuuggugaagag

SEQ ID NO: 1846 - RNA, 19 nt, Artificial Sequence
  Description of Artificial Sequence: Synthetic oligonucleotide
aauaggcuggaggcaaucu

SEQ ID NO: 1847 - RNA, 19 nt, Artificial Sequence
  Description of Artificial Sequence: Synthetic oligonucleotide
augccgcucuuaaauaggc

SEQ ID NO: 1848 - RNA, 19 nt, Artificial Sequence
  Description of Artificial Sequence: Synthetic oligonucleotide
acguugguagacauacagg

SEQ ID NO: 1849 - RNA, 19 nt, Artificial Sequence
  Description of Artificial Sequence: Synthetic oligonucleotide
aaaccacguugguagacau

SEQ ID NO: 1850 - RNA, 19 nt, Artificial Sequence
  Description of Artificial Sequence: Synthetic oligonucleotide
aguaugauauccgccaaaa

SEQ ID NO: 1851 - RNA, 19 nt, Artificial Sequence
  Description of Artificial Sequence: Synthetic oligonucleotide
aauggugcaguaugauauc

SEQ ID NO: 1852 - RNA, 19 nt, Artificial Sequence
  Description of Artificial Sequence: Synthetic oligonucleotide
cgaugcaauggugcaguau

SEQ ID NO: 1853 - RNA, 19 nt, Artificial Sequence
  Description of Artificial Sequence: Synthetic oligonucleotide
cacaaucaggauugggucu

SEQ ID NO: 1854 - RNA, 19 nt, Artificial Sequence
  Description of Artificial Sequence: Synthetic oligonucleotide
aauugucaucacaaucagg

SEQ ID NO: 1855 - RNA, 19 nt, Artificial Sequence
  Description of Artificial Sequence: Synthetic oligonucleotide
cacaccaagaauugucauc

SEQ ID NO: 1856 - RNA, 19 nt, Artificial Sequence
  Description of Artificial Sequence: Synthetic oligonucleotide
caacagaaccacaccaaga

SEQ ID NO: 1857 - RNA, 19 nt, Artificial Sequence
  Description of Artificial Sequence: Synthetic oligonucleotide
gaagaaucuguguaccacg

SEQ ID NO: 1858 - RNA, 19 nt, Artificial Sequence
  Description of Artificial Sequence: Synthetic oligonucleotide
ggagucaugaucugaagaa

SEQ ID NO: 1859 - RNA, 19 nt, Artificial Sequence
  Description of Artificial Sequence: Synthetic oligonucleotide
aauggaaugggaaguugga

SEQ ID NO: 1860 - RNA, 19 nt, Artificial Sequence
  Description of Artificial Sequence: Synthetic oligonucleotide
aguuggagccucuggauau

SEQ ID NO: 1861 - RNA, 19 nt, Artificial Sequence
  Description of Artificial Sequence: Synthetic oligonucleotide
ggaaaggagagaccucguu

SEQ ID NO: 1862 - RNA, 19 nt, Artificial Sequence
  Description of Artificial Sequence: Synthetic oligonucleotide
gaaaggagagaccucguuu

SEQ ID NO: 1863 - RNA, 19 nt, Artificial Sequence
  Description of Artificial Sequence: Synthetic oligonucleotide
cugcaauggaagggaacga

SEQ ID NO: 1864 - RNA, 19 nt, Artificial Sequence
  Description of Artificial Sequence: Synthetic oligonucleotide
aggccaucacgagagauca

SEQ ID NO: 1865 - RNA, 19 nt, Artificial Sequence
  Description of Artificial Sequence: Synthetic oligonucleotide
aucacgagagaucaaugca

SEQ ID NO: 1866 - RNA, 19 nt, Artificial Sequence
  Description of Artificial Sequence: Synthetic oligonucleotide
uuccggagcuacaccuucu

SEQ ID NO: 1867 - RNA, 19 nt, Artificial Sequence
  Description of Artificial Sequence: Synthetic oligonucleotide
uccggagcuacaccuucua

SEQ ID NO: 1868 - RNA, 19 nt, Artificial Sequence
  Description of Artificial Sequence: Synthetic oligonucleotide
acaccuucuaccgcuacca

SEQ ID NO: 1869 - RNA, 19 nt, Artificial Sequence
  Description of Artificial Sequence: Synthetic oligonucleotide
acgacaucaacaagcggua

SEQ ID NO: 1870 - RNA, 19 nt, Artificial Sequence
  Description of Artificial Sequence: Synthetic oligonucleotide
uguucgacagcggcauuaa

SEQ ID NO: 1871 - RNA, 19 nt, Artificial Sequence
  Description of Artificial Sequence: Synthetic oligonucleotide
uggguuucgguuacugcau

SEQ ID NO: 1872 - RNA, 19 nt, Artificial Sequence
  Description of Artificial Sequence: Synthetic oligonucleotide
uucgguuacugcauggcca

SEQ ID NO: 1873 - RNA, 19 nt, Artificial Sequence
  Description of Artificial Sequence: Synthetic oligonucleotide
acaauguuuacaugaagua

SEQ ID NO: 1874 - RNA, 19 nt, Artificial Sequence
  Description of Artificial Sequence: Synthetic oligonucleotide
gguggggcauuuaguggua

SEQ ID NO: 1875 - RNA, 19 nt, Artificial Sequence
  Description of Artificial Sequence: Synthetic oligonucleotide
ggggcauuuagugguacga

SEQ ID NO: 1876 - RNA, 19 nt, Artificial Sequence
  Description of Artificial Sequence: Synthetic oligonucleotide
auuuagugguacgacgcuu

SEQ ID NO: 1877 - RNA, 19 nt, Artificial Sequence
  Description of Artificial Sequence: Synthetic oligonucleotide
uuagugguacgacgcuucu

SEQ ID NO: 1878 - RNA, 19 nt, Artificial Sequence
  Description of Artificial Sequence: Synthetic oligonucleotide
uagugguacgacgcuucuu

SEQ ID NO: 1879 - RNA, 19 nt, Artificial Sequence
  Description of Artificial Sequence: Synthetic oligonucleotide
aaugcauugcugugagagu

SEQ ID NO: 1880 - RNA, 19 nt, Artificial Sequence
  Description of Artificial Sequence: Synthetic oligonucleotide
uccaacuucccauuccauu

SEQ ID NO: 1881 - RNA, 19 nt, Artificial Sequence
  Description of Artificial Sequence: Synthetic oligonucleotide
auauccagaggcuccaacu

SEQ ID NO: 1882 - RNA, 19 nt, Artificial Sequence
  Description of Artificial Sequence: Synthetic oligonucleotide
aacgaggucucuccuuucc

SEQ ID NO: 1883 - RNA, 19 nt, Artificial Sequence
  Description of Artificial Sequence: Synthetic oligonucleotide
aaacgaggucucuccuuuc

SEQ ID NO: 1884 - RNA, 19 nt, Artificial Sequence
  Description of Artificial Sequence: Synthetic oligonucleotide
ucguucccuuccauugcag

SEQ ID NO: 1885 - RNA, 19 nt, Artificial Sequence
  Description of Artificial Sequence: Synthetic oligonucleotide
ugaucucucgugauggccu

SEQ ID NO: 1886 - RNA, 19 nt, Artificial Sequence
  Description of Artificial Sequence: Synthetic oligonucleotide
ugcauugaucucucgugau

SEQ ID NO: 1887 - RNA, 19 nt, Artificial Sequence
  Description of Artificial Sequence: Synthetic oligonucleotide
agaagguguagcuccggaa

SEQ ID NO: 1888 - RNA, 19 nt, Artificial Sequence
  Description of Artificial Sequence: Synthetic oligonucleotide
uagaagguguagcuccgga

SEQ ID NO: 1889 - RNA, 19 nt, Artificial Sequence
  Description of Artificial Sequence: Synthetic oligonucleotide
ugguagcgguagaaggugu

SEQ ID NO: 1890 - RNA, 19 nt, Artificial Sequence
  Description of Artificial Sequence: Synthetic oligonucleotide
uaccgcuuguugaugucgu

SEQ ID NO: 1891 - RNA, 19 nt, Artificial Sequence
  Description of Artificial Sequence: Synthetic oligonucleotide
uuaaugccgcugucgaaca

SEQ ID NO: 1892 - RNA, 19 nt, Artificial Sequence
  Description of Artificial Sequence: Synthetic oligonucleotide
augcaguaaccgaaaccca

SEQ ID NO: 1893 - RNA, 19 nt, Artificial Sequence
  Description of Artificial Sequence: Synthetic oligonucleotide
uggccaugcaguaaccgaa

SEQ ID NO: 1894 - RNA, 19 nt, Artificial Sequence
  Description of Artificial Sequence: Synthetic oligonucleotide
uacuucauguaaacauugu

SEQ ID NO: 1895 - RNA, 19 nt, Artificial Sequence
  Description of Artificial Sequence: Synthetic oligonucleotide
uaccacuaaaugccccacc

SEQ ID NO: 1896 - RNA, 19 nt, Artificial Sequence
  Description of Artificial Sequence: Synthetic oligonucleotide
agcgucguaccacuaaaug

SEQ ID NO: 1897 - RNA, 19 nt, Artificial Sequence
  Description of Artificial Sequence: Synthetic oligonucleotide
aagcgucguaccacuaaau

SEQ ID NO: 1898 - RNA, 19 nt, Artificial Sequence
  Description of Artificial Sequence: Synthetic oligonucleotide
agaagcgucguaccacuaa

SEQ ID NO: 1899 - RNA, 19 nt, Artificial Sequence
  Description of Artificial Sequence: Synthetic oligonucleotide
aagaagcgucguaccacua

SEQ ID NO: 1900 - RNA, 19 nt, Artificial Sequence
  Description of Artificial Sequence: Synthetic oligonucleotide
acucucacagcaaugcauu

SEQ ID NO: 1901 - RNA, 19 nt, Artificial Sequence
  Description of Artificial Sequence: Synthetic oligonucleotide
agcucugagcagaucauga

SEQ ID NO: 1902 - RNA, 19 nt, Artificial Sequence
  Description of Artificial Sequence: Synthetic oligonucleotide
gagcagaucaugaagacag

SEQ ID NO: 1903 - RNA, 19 nt, Artificial Sequence
  Description of Artificial Sequence: Synthetic oligonucleotide
uuugcuacaggguuucauc

SEQ ID NO: 1904 - RNA, 19 nt, Artificial Sequence
  Description of Artificial Sequence: Synthetic oligonucleotide
ugcuacaggguuucaucca

SEQ ID NO: 1905 - RNA, 19 nt, Artificial Sequence
  Description of Artificial Sequence: Synthetic oligonucleotide
uuucauccaggaucgagcu

SEQ ID NO: 1906 - RNA, 19 nt, Artificial Sequence
  Description of Artificial Sequence: Synthetic oligonucleotide
auacaccugagcugaccuu

SEQ ID NO: 1907 - RNA, 19 nt, Artificial Sequence
  Description of Artificial Sequence: Synthetic oligonucleotide
aggauccgucuaccaagaa

SEQ ID NO: 1908 - RNA, 19 nt, Artificial Sequence
  Description of Artificial Sequence: Synthetic oligonucleotide
ccgucuaccaagaaguuga

SEQ ID NO: 1909 - RNA, 19 nt, Artificial Sequence
  Description of Artificial Sequence: Synthetic oligonucleotide
uaccaagaaguugagcgag

SEQ ID NO: 1910 - RNA, 19 nt, Artificial Sequence
  Description of Artificial Sequence: Synthetic oligonucleotide
gaauuggagaugagcugga

SEQ ID NO: 1911 - RNA, 19 nt, Artificial Sequence
  Description of Artificial Sequence: Synthetic oligonucleotide
augagcuggacagcaacau

SEQ ID NO: 1912 - RNA, 19 nt, Artificial Sequence
  Description of Artificial Sequence: Synthetic oligonucleotide
cugcagaggaugauugcua

SEQ ID NO: 1913 - RNA, 19 nt, Artificial Sequence
  Description of Artificial Sequence: Synthetic oligonucleotide
ugauugcuaauguggauac

SEQ ID NO: 1914 - RNA, 19 nt, Artificial Sequence
  Description of Artificial Sequence: Synthetic oligonucleotide
auacuaacuccccacgaga

SEQ ID NO: 1915 - RNA, 19 nt, Artificial Sequence
  Description of Artificial Sequence: Synthetic oligonucleotide
cagcugacauguuugcuga

SEQ ID NO: 1916 - RNA, 19 nt, Artificial Sequence
  Description of Artificial Sequence: Synthetic oligonucleotide
uguuugcugauggcaacuu

SEQ ID NO: 1917 - RNA, 19 nt, Artificial Sequence
  Description of Artificial Sequence: Synthetic oligonucleotide
guuguugcccuuuucuacu

SEQ ID NO: 1918 - RNA, 19 nt, Artificial Sequence
  Description of Artificial Sequence: Synthetic oligonucleotide
cuuugcuagcaaacuggug

SEQ ID NO: 1919 - RNA, 19 nt, Artificial Sequence
  Description of Artificial Sequence: Synthetic oligonucleotide
aaagugcccgagcuaauca

SEQ ID NO: 1920 - RNA, 19 nt, Artificial Sequence
  Description of Artificial Sequence: Synthetic oligonucleotide
cuaaucagaaccaucaugg

SEQ ID NO: 1921 - RNA, 19 nt, Artificial Sequence
  Description of Artificial Sequence: Synthetic oligonucleotide
uaaucagaaccaucauggg

SEQ ID NO: 1922 - RNA, 19 nt, Artificial Sequence
  Description of Artificial Sequence: Synthetic oligonucleotide
uugucuggauccaagacca

SEQ ID NO: 1923 - RNA, 19 nt, Artificial Sequence
  Description of Artificial Sequence: Synthetic oligonucleotide
auggccuccucucauacuu

SEQ ID NO: 1924 - RNA, 19 nt, Artificial Sequence
  Description of Artificial Sequence: Synthetic oligonucleotide
gacagugacuaucuuugug

SEQ ID NO: 1925 - RNA, 19 nt, Artificial Sequence
  Description of Artificial Sequence: Synthetic oligonucleotide
gugacuaucuuuguggcug

SEQ ID NO: 1926 - RNA, 19 nt, Artificial Sequence
  Description of Artificial Sequence: Synthetic oligonucleotide
acucacgaucuggaagaac

SEQ ID NO: 1927 - RNA, 19 nt, Artificial Sequence
  Description of Artificial Sequence: Synthetic oligonucleotide
aucuggaagaacaugggcu

SEQ ID NO: 1928 - RNA, 19 nt, Artificial Sequence
  Description of Artificial Sequence: Synthetic oligonucleotide
gucuuggacuauugucuuu

SEQ ID NO: 1929 - RNA, 19 nt, Artificial Sequence
  Description of Artificial Sequence: Synthetic oligonucleotide
uuuguaauuauugggaggg

SEQ ID NO: 1930 - RNA, 19 nt, Artificial Sequence
  Description of Artificial Sequence: Synthetic oligonucleotide
guaauuauugggaggggug

SEQ ID NO: 1931 - RNA, 19 nt, Artificial Sequence
  Description of Artificial Sequence: Synthetic oligonucleotide
aggggacaauaaaccucag

SEQ ID NO: 1932 - RNA, 19 nt, Artificial Sequence
  Description of Artificial Sequence: Synthetic oligonucleotide
accucagguccacuuuaaa

SEQ ID NO: 1933 - RNA, 19 nt, Artificial Sequence
  Description of Artificial Sequence: Synthetic oligonucleotide
ucaugaucugcucagagcu

SEQ ID NO: 1934 - RNA, 19 nt, Artificial Sequence
  Description of Artificial Sequence: Synthetic oligonucleotide
cugucuucaugaucugcuc

SEQ ID NO: 1935 - RNA, 19 nt, Artificial Sequence
  Description of Artificial Sequence: Synthetic oligonucleotide
gaugaaacccuguagcaaa

SEQ ID NO: 1936 - RNA, 19 nt, Artificial Sequence
  Description of Artificial Sequence: Synthetic oligonucleotide
uggaugaaacccuguagca

SEQ ID NO: 1937 - RNA, 19 nt, Artificial Sequence
  Description of Artificial Sequence: Synthetic oligonucleotide
agcucgauccuggaugaaa

SEQ ID NO: 1938 - RNA, 19 nt, Artificial Sequence
  Description of Artificial Sequence: Synthetic oligonucleotide
aaggucagcucagguguau

SEQ ID NO: 1939 - RNA, 19 nt, Artificial Sequence
  Description of Artificial Sequence: Synthetic oligonucleotide
uucuugguagacggauccu

SEQ ID NO: 1940 - RNA, 19 nt, Artificial Sequence
  Description of Artificial Sequence: Synthetic oligonucleotide
ucaacuucuugguagacgg

SEQ ID NO: 1941 - RNA, 19 nt, Artificial Sequence
  Description of Artificial Sequence: Synthetic oligonucleotide
cucgcucaacuucuuggua

SEQ ID NO: 1942 - RNA, 19 nt, Artificial Sequence
  Description of Artificial Sequence: Synthetic oligonucleotide
uccagcucaucuccaauuc

SEQ ID NO: 1943 - RNA, 19 nt, Artificial Sequence
  Description of Artificial Sequence: Synthetic oligonucleotide
auguugcuguccagcucau

SEQ ID NO: 1944 - RNA, 19 nt, Artificial Sequence
  Description of Artificial Sequence: Synthetic oligonucleotide
uagcaaucauccucugcag

SEQ ID NO: 1945 - RNA, 19 nt, Artificial Sequence
  Description of Artificial Sequence: Synthetic oligonucleotide
guauccacauuagcaauca

SEQ ID NO: 1946 - RNA, 19 nt, Artificial Sequence
  Description of Artificial Sequence: Synthetic oligonucleotide
ucucguggggaguuaguau

SEQ ID NO: 1947 - RNA, 19 nt, Artificial Sequence
  Description of Artificial Sequence: Synthetic oligonucleotide
ucagcaaacaugucagcug

SEQ ID NO: 1948 - RNA, 19 nt, Artificial Sequence
  Description of Artificial Sequence: Synthetic oligonucleotide
aaguugccaucagcaaaca

SEQ ID NO: 1949 - RNA, 19 nt, Artificial Sequence
  Description of Artificial Sequence: Synthetic oligonucleotide
aguagaaaagggcaacaac

SEQ ID NO: 1950 - RNA, 19 nt, Artificial Sequence
  Description of Artificial Sequence: Synthetic oligonucleotide
caccaguuugcuagcaaag

SEQ ID NO: 1951 - RNA, 19 nt, Artificial Sequence
  Description of Artificial Sequence: Synthetic oligonucleotide
ugauuagcucgggcacuuu

SEQ ID NO: 1952 - RNA, 19 nt, Artificial Sequence
  Description of Artificial Sequence: Synthetic oligonucleotide
ccaugaugguucugauuag

SEQ ID NO: 1953 - RNA, 19 nt, Artificial Sequence
  Description of Artificial Sequence: Synthetic oligonucleotide
cccaugaugguucugauua

SEQ ID NO: 1954 - RNA, 19 nt, Artificial Sequence
  Description of Artificial Sequence: Synthetic oligonucleotide
uggucuuggauccagacaa

SEQ ID NO: 1955 - RNA, 19 nt, Artificial Sequence
  Description of Artificial Sequence: Synthetic oligonucleotide
aaguaugagaggaggccau

SEQ ID NO: 1956 - RNA, 19 nt, Artificial Sequence
  Description of Artificial Sequence: Synthetic oligonucleotide
cacaaagauagucacuguc

SEQ ID NO: 1957 - RNA, 19 nt, Artificial Sequence
  Description of Artificial Sequence: Synthetic oligonucleotide
cagccacaaagauagucac

SEQ ID NO: 1958 - RNA, 19 nt, Artificial Sequence
  Description of Artificial Sequence: Synthetic oligonucleotide
guucuuccagaucgugagu

SEQ ID NO: 1959 - RNA, 19 nt, Artificial Sequence
  Description of Artificial Sequence: Synthetic oligonucleotide
agcccauguucuuccagau

SEQ ID NO: 1960 - RNA, 19 nt, Artificial Sequence
  Description of Artificial Sequence: Synthetic oligonucleotide
aaagacaauaguccaagac

SEQ ID NO: 1961 - RNA, 19 nt, Artificial Sequence
  Description of Artificial Sequence: Synthetic oligonucleotide
cccucccaauaauuacaaa

SEQ ID NO: 1962 - RNA, 19 nt, Artificial Sequence
  Description of Artificial Sequence: Synthetic oligonucleotide
caccccucccaauaauuac

SEQ ID NO: 1963 - RNA, 19 nt, Artificial Sequence
  Description of Artificial Sequence: Synthetic oligonucleotide
cugagguuuauuguccccu

SEQ ID NO: 1964 - RNA, 19 nt, Artificial Sequence
  Description of Artificial Sequence: Synthetic oligonucleotide
uuuaaaguggaccugaggu

SEQ ID NO: 1965 - RNA, 19 nt, Artificial Sequence
  Description of Artificial Sequence: Synthetic oligonucleotide
acucaaggaccagcugauu

SEQ ID NO: 1966 - RNA, 19 nt, Artificial Sequence
  Description of Artificial Sequence: Synthetic oligonucleotide
cuacuuaaggaagaacaga

SEQ ID NO: 1967 - RNA, 19 nt, Artificial Sequence
  Description of Artificial Sequence: Synthetic oligonucleotide
gauuacgauuguugggguu

SEQ ID NO: 1968 - RNA, 19 nt, Artificial Sequence
  Description of Artificial Sequence: Synthetic oligonucleotide
caguauccucaugaaggac

SEQ ID NO: 1969 - RNA, 19 nt, Artificial Sequence
  Description of Artificial Sequence: Synthetic oligonucleotide
acuuagcagaugagcuugc

SEQ ID NO: 1970 - RNA, 19 nt, Artificial Sequence
  Description of Artificial Sequence: Synthetic oligonucleotide
cccuuguugaugucaugga

SEQ ID NO: 1971 - RNA, 19 nt, Artificial Sequence
  Description of Artificial Sequence: Synthetic oligonucleotide
uuuccucagaacaccaaaa

SEQ ID NO: 1972 - RNA, 19 nt, Artificial Sequence
  Description of Artificial Sequence: Synthetic oligonucleotide
aagacuauagugugacagc

SEQ ID NO: 1973 - RNA, 19 nt, Artificial Sequence
  Description of Artificial Sequence: Synthetic oligonucleotide
caagcuggucauugucaca

SEQ ID NO: 1974 - RNA, 19 nt, Artificial Sequence
  Description of Artificial Sequence: Synthetic oligonucleotide
aacgaaacgugaacaucuu

SEQ ID NO: 1975 - RNA, 19 nt, Artificial Sequence
  Description of Artificial Sequence: Synthetic oligonucleotide
ucaucauucccaacguugu

SEQ ID NO: 1976 - RNA, 19 nt, Artificial Sequence
  Description of Artificial Sequence: Synthetic oligonucleotide
gaaauacaguccagacugc

SEQ ID NO: 1977 - RNA, 19 nt, Artificial Sequence
  Description of Artificial Sequence: Synthetic oligonucleotide
uucaaacccaguggauauc

SEQ ID NO: 1978 - RNA, 19 nt, Artificial Sequence
  Description of Artificial Sequence: Synthetic oligonucleotide
uuauugggaguggcugcaa

SEQ ID NO: 1979 - RNA, 19 nt, Artificial Sequence
  Description of Artificial Sequence: Synthetic oligonucleotide
ccguuaucugaugggagaa

SEQ ID NO: 1980 - RNA, 19 nt, Artificial Sequence
  Description of Artificial Sequence: Synthetic oligonucleotide
uucacccacuaagcuguca

SEQ ID NO: 1981 - RNA, 19 nt, Artificial Sequence
  Description of Artificial Sequence: Synthetic oligonucleotide
uguguggaguggagugaau

SEQ ID NO: 1982 - RNA, 19 nt, Artificial Sequence
  Description of Artificial Sequence: Synthetic oligonucleotide
gaguggagugaauguagcu

SEQ ID NO: 1983 - RNA, 19 nt, Artificial Sequence
  Description of Artificial Sequence: Synthetic oligonucleotide
ucucccugaagaaucugaa

SEQ ID NO: 1984 - RNA, 19 nt, Artificial Sequence
  Description of Artificial Sequence: Synthetic oligonucleotide
acaaggagcaguggaauga

SEQ ID NO: 1985 - RNA, 19 nt, Artificial Sequence
  Description of Artificial Sequence: Synthetic oligonucleotide
aaugagguucacaagcagg

SEQ ID NO: 1986 - RNA, 19 nt, Artificial Sequence
  Description of Artificial Sequence: Synthetic oligonucleotide
agugccuaugaggugauca

SEQ ID NO: 1987 - RNA, 19 nt, Artificial Sequence
  Description of Artificial Sequence: Synthetic oligonucleotide
ucaaacugaaggguuauac

SEQ ID NO: 1988 - RNA, 19 nt, Artificial Sequence
  Description of Artificial Sequence: Synthetic oligonucleotide
ccugggccauuggucuguc

SEQ ID NO: 1989 - RNA, 19 nt, Artificial Sequence
  Description of Artificial Sequence: Synthetic oligonucleotide
gagagcauaaugaagaauc

SEQ ID NO: 1990 - RNA, 19 nt, Artificial Sequence
  Description of Artificial Sequence: Synthetic oligonucleotide
ugcaucccauuucuaccau

SEQ ID NO: 1991 - RNA, 19 nt, Artificial Sequence
  Description of Artificial Sequence: Synthetic oligonucleotide
aagggucucuauggaauca

SEQ ID NO: 1992 - RNA, 19 nt, Artificial Sequence
  Description of Artificial Sequence: Synthetic oligonucleotide
cuauggaaucaaggaugau

SEQ ID NO: 1993 - RNA, 19 nt, Artificial Sequence
  Description of Artificial Sequence: Synthetic oligonucleotide
cugggacaaaauggaaucu

SEQ ID NO: 1994 - RNA, 19 nt, Artificial Sequence
  Description of Artificial Sequence: Synthetic oligonucleotide
ugugaaggugacucuaacu

SEQ ID NO: 1995 - RNA, 19 nt, Artificial Sequence
  Description of Artificial Sequence: Synthetic oligonucleotide
gacucuaacuucugaagag

SEQ ID NO: 1996 - RNA, 19 nt, Artificial Sequence
  Description of Artificial Sequence: Synthetic oligonucleotide
cuugaagaagagugcagau

SEQ ID NO: 1997 - RNA, 19 nt, Artificial Sequence
  Description of Artificial Sequence: Synthetic oligonucleotide
aaucagcugguccuugagu

SEQ ID NO: 1998 - RNA, 19 nt, Artificial Sequence
  Description of Artificial Sequence: Synthetic oligonucleotide
ucuguucuuccuuaaguag

SEQ ID NO: 1999 - RNA, 19 nt, Artificial Sequence
  Description of Artificial Sequence: Synthetic oligonucleotide
aaccccaacaaucguaauc

SEQ ID NO: 2000 - RNA, 19 nt, Artificial Sequence
  Description of Artificial Sequence: Synthetic oligonucleotide
guccuucaugaggauacug

SEQ ID NO: 2001 - RNA, 19 nt, Artificial Sequence
  Description of Artificial Sequence: Synthetic oligonucleotide
gcaagcucaucugcuaagu

SEQ ID NO: 2002 - RNA, 19 nt, Artificial Sequence
  Description of Artificial Sequence: Synthetic oligonucleotide
uccaugacaucaacaaggg

SEQ ID NO: 2003 - RNA, 19 nt, Artificial Sequence
  Description of Artificial Sequence: Synthetic oligonucleotide
uuuugguguucugaggaaa

SEQ ID NO: 2004 - RNA, 19 nt, Artificial Sequence
  Description of Artificial Sequence: Synthetic oligonucleotide
gcugucacacuauagucuu

SEQ ID NO: 2005 - RNA, 19 nt, Artificial Sequence
  Description of Artificial Sequence: Synthetic oligonucleotide
ugugacaaugaccagcuug

SEQ ID NO: 2006 - RNA, 19 nt, Artificial Sequence
  Description of Artificial Sequence: Synthetic oligonucleotide
aagauguucacguuucguu

SEQ ID NO: 2007 - RNA, 19 nt, Artificial Sequence
  Description of Artificial Sequence: Synthetic oligonucleotide
acaacguugggaaugauga

SEQ ID NO: 2008 - RNA, 19 nt, Artificial Sequence
  Description of Artificial Sequence: Synthetic oligonucleotide
gcagucuggacuguauuuc

SEQ ID NO: 2009 - RNA, 19 nt, Artificial Sequence
  Description of Artificial Sequence: Synthetic oligonucleotide
gauauccacuggguuugaa

SEQ ID NO: 2010 - RNA, 19 nt, Artificial Sequence
  Description of Artificial Sequence: Synthetic oligonucleotide
uugcagccacucccaauaa

SEQ ID NO: 2011 - RNA, 19 nt, Artificial Sequence
  Description of Artificial Sequence: Synthetic oligonucleotide
uucucccaucagauaacgg

SEQ ID NO: 2012 - RNA, 19 nt, Artificial Sequence
  Description of Artificial Sequence: Synthetic oligonucleotide
ugacagcuuagugggugaa

SEQ ID NO: 2013 - RNA, 19 nt, Artificial Sequence
  Description of Artificial Sequence: Synthetic oligonucleotide
auucacuccacuccacaca

SEQ ID NO: 2014 - RNA, 19 nt, Artificial Sequence
  Description of Artificial Sequence: Synthetic oligonucleotide
agcuacauucacuccacuc

SEQ ID NO: 2015 - RNA, 19 nt, Artificial Sequence
  Description of Artificial Sequence: Synthetic oligonucleotide
uucagauucuucagggaga

SEQ ID NO: 2016 - RNA, 19 nt, Artificial Sequence
  Description of Artificial Sequence: Synthetic oligonucleotide
ucauuccacugcuccuugu

SEQ ID NO: 2017 - RNA, 19 nt, Artificial Sequence
  Description of Artificial Sequence: Synthetic oligonucleotide
ccugcuugugaaccucauu

SEQ ID NO: 2018 - RNA, 19 nt, Artificial Sequence
  Description of Artificial Sequence: Synthetic oligonucleotide
ugaucaccucauaggcacu

SEQ ID NO: 2019 - RNA, 19 nt, Artificial Sequence
  Description of Artificial Sequence: Synthetic oligonucleotide
guauaacccuucaguuuga

SEQ ID NO: 2020 - RNA, 19 nt, Artificial Sequence
  Description of Artificial Sequence: Synthetic oligonucleotide
gacagaccaauggcccagg

SEQ ID NO: 2021 - RNA, 19 nt, Artificial Sequence
  Description of Artificial Sequence: Synthetic oligonucleotide
gauucuucauuaugcucuc

SEQ ID NO: 2022 - RNA, 19 nt, Artificial Sequence
  Description of Artificial Sequence: Synthetic oligonucleotide
augguagaaaugggaugca

SEQ ID NO: 2023 - RNA, 19 nt, Artificial Sequence
  Description of Artificial Sequence: Synthetic oligonucleotide
ugauuccauagagacccuu

SEQ ID NO: 2024 - RNA, 19 nt, Artificial Sequence
  Description of Artificial Sequence: Synthetic oligonucleotide
aucauccuugauuccauag

SEQ ID NO: 2025 - RNA, 19 nt, Artificial Sequence
  Description of Artificial Sequence: Synthetic oligonucleotide
agauuccauuuugucccag

SEQ ID NO: 2026 - RNA, 19 nt, Artificial Sequence
  Description of Artificial Sequence: Synthetic oligonucleotide
aguuagagucaccuucaca

SEQ ID NO: 2027 - RNA, 19 nt, Artificial Sequence
  Description of Artificial Sequence: Synthetic oligonucleotide
cucuucagaaguuagaguc

SEQ ID NO: 2028 - RNA, 19 nt, Artificial Sequence
  Description of Artificial Sequence: Synthetic oligonucleotide
aucugcacucuucuucaag

SEQ ID NO: 2029 - DNA, 21 bp, Artificial Sequence
  Description of Artificial Sequence: Synthetic oligonucleotide
  Description of Combined DNA/RNA Molecule: Synthetic oligonucleotide
ccgucuaccaagaaguugatt

SEQ ID NO: 2030 - DNA, 21 bp, Artificial Sequence
  Description of Artificial Sequence: Synthetic oligonucleotide
  Description of Combined DNA/RNA Molecule: Synthetic oligonucleotide
cagcugacauguuugcugatt

SEQ ID NO: 2031 - DNA, 21 bp, Artificial Sequence
  Description of Artificial Sequence: Synthetic oligonucleotide
  Description of Combined DNA/RNA Molecule: Synthetic oligonucleotide
guuguugcccuuuucuacutt

SEQ ID NO: 2032 - DNA, 21 bp, Artificial Sequence
  Description of Artificial Sequence: Synthetic oligonucleotide
  Description of Combined DNA/RNA Molecule: Synthetic oligonucleotide
gacagugacuaucuuugugtt

SEQ ID NO: 2033 - DNA, 21 bp, Artificial Sequence
  Description of Artificial Sequence: Synthetic oligonucleotide
  Description of Combined DNA/RNA Molecule: Synthetic oligonucleotide
agcucugagcagaucaugatt

SEQ ID NO: 2034 - DNA, 21 bp, Artificial Sequence
  Description of Artificial Sequence: Synthetic oligonucleotide
  Description of Combined DNA/RNA Molecule: Synthetic oligonucleotide
gucuuucgaagcuauguuutt

SEQ ID NO: 2035 - DNA, 21 bp, Artificial Sequence
  Description of Artificial Sequence: Synthetic oligonucleotide
  Description of Combined DNA/RNA Molecule: Synthetic oligonucleotide
gcagcuugcuaucauuggatt

SEQ ID NO: 2036 - DNA, 21 bp, Artificial Sequence
  Description of Artificial Sequence: Synthetic oligonucleotide
  Description of Combined DNA/RNA Molecule: Synthetic oligonucleotide
gcuaucauuggagaugacatt

SEQ ID NO: 2037 - DNA, 21 bp, Artificial Sequence
  Description of Artificial Sequence: Synthetic oligonucleotide
  Description of Combined DNA/RNA Molecule: Synthetic oligonucleotide
gccuauuuaagagcggcautt

SEQ ID NO: 2038 - DNA, 21 bp, Artificial Sequence
  Description of Artificial Sequence: Synthetic oligonucleotide
  Description of Combined DNA/RNA Molecule: Synthetic oligonucleotide
cgugguacacagauucuuctt

SEQ ID NO: 2039 - DNA, 21 bp, Artificial Sequence
  Description of Artificial Sequence: Synthetic oligonucleotide
  Description of Combined DNA/RNA Molecule: Synthetic oligonucleotide
cuacuuaaggaagaacagatt

SEQ ID NO: 2040 - DNA, 21 bp, Artificial Sequence
  Description of Artificial Sequence: Synthetic oligonucleotide
  Description of Combined DNA/RNA Molecule: Synthetic oligonucleotide
caagcuggucauugucacatt

SEQ ID NO: 2041 - DNA, 21 bp, Artificial Sequence
  Description of Artificial Sequence: Synthetic oligonucleotide
  Description of Combined DNA/RNA Molecule: Synthetic oligonucleotide
ucaucauucccaacguugutt

SEQ ID NO: 2042 - DNA, 21 bp, Artificial Sequence
  Description of Artificial Sequence: Synthetic oligonucleotide
  Description of Combined DNA/RNA Molecule: Synthetic oligonucleotide
gaguggagugaauguagcutt

SEQ ID NO: 2043 - DNA, 21 bp, Artificial Sequence
  Description of Artificial Sequence: Synthetic oligonucleotide
  Description of Combined DNA/RNA Molecule: Synthetic oligonucleotide
acaaggagcaguggaaugatt

SEQ ID NO: 2044 - DNA, 21 bp, Artificial Sequence
  Description of Artificial Sequence: Synthetic oligonucleotide
  Description of Combined DNA/RNA Molecule: Synthetic oligonucleotide
ucaacuucuugguagacggtt

SEQ ID NO: 2045 - DNA, 21 bp, Artificial Sequence
  Description of Artificial Sequence: Synthetic oligonucleotide
  Description of Combined DNA/RNA Molecule: Synthetic oligonucleotide
ucagcaaacaugucagcugtt

SEQ ID NO: 2046 - DNA, 21 bp, Artificial Sequence
  Description of Artificial Sequence: Synthetic oligonucleotide
  Description of Combined DNA/RNA Molecule: Synthetic oligonucleotide
aguagaaaagggcaacaactt

SEQ ID NO: 2047 - DNA, 21 bp, Artificial Sequence
  Description of Artificial Sequence: Synthetic oligonucleotide
  Description of Combined DNA/RNA Molecule: Synthetic oligonucleotide
cacaaagauagucacuguctt

SEQ ID NO: 2048 - DNA, 21 bp, Artificial Sequence
  Description of Artificial Sequence: Synthetic oligonucleotide
  Description of Combined DNA/RNA Molecule: Synthetic oligonucleotide
ucaugaucugcucagagcutt

SEQ ID NO: 2049 - DNA, 21 bp, Artificial Sequence
  Description of Artificial Sequence: Synthetic oligonucleotide
  Description of Combined DNA/RNA Molecule: Synthetic oligonucleotide
aaacauagcuucgaaagactt

SEQ ID NO: 2050 - DNA, 21 bp, Artificial Sequence
  Description of Artificial Sequence: Synthetic oligonucleotide
  Description of Combined DNA/RNA Molecule: Synthetic oligonucleotide
uccaaugauagcaagcugctt

SEQ ID NO: 2051 - DNA, 21 bp, Artificial Sequence
  Description of Artificial Sequence: Synthetic oligonucleotide
  Description of Combined DNA/RNA Molecule: Synthetic oligonucleotide
ugucaucuccaaugauagctt

SEQ ID NO: 2052 - DNA, 21 bp, Artificial Sequence
  Description of Artificial Sequence: Synthetic oligonucleotide
  Description of Combined DNA/RNA Molecule: Synthetic oligonucleotide
augccgcucuuaaauaggctt

SEQ ID NO: 2053 - DNA, 21 bp, Artificial Sequence
  Description of Artificial Sequence: Synthetic oligonucleotide
  Description of Combined DNA/RNA Molecule: Synthetic oligonucleotide
gaagaaucuguguaccacgtt

SEQ ID NO: 2054 - DNA, 21 bp, Artificial Sequence
  Description of Artificial Sequence: Synthetic oligonucleotide
  Description of Combined DNA/RNA Molecule: Synthetic oligonucleotide
ucuguucuuccuuaaguagtt

SEQ ID NO: 2055 - DNA, 21 bp, Artificial Sequence
  Description of Artificial Sequence: Synthetic oligonucleotide
  Description of Combined DNA/RNA Molecule: Synthetic oligonucleotide
ugugacaaugaccagcuugtt

SEQ ID NO: 2056 - DNA, 21 bp, Artificial Sequence
  Description of Artificial Sequence: Synthetic oligonucleotide
  Description of Combined DNA/RNA Molecule: Synthetic oligonucleotide
acaacguugggaaugaugatt

SEQ ID NO: 2057 - DNA, 21 bp, Artificial Sequence
  Description of Artificial Sequence: Synthetic oligonucleotide
  Description of Combined DNA/RNA Molecule: Synthetic oligonucleotide
agcuacauucacuccacuctt

SEQ ID NO: 2058 - DNA, 21 bp, Artificial Sequence
  Description of Artificial Sequence: Synthetic oligonucleotide
  Description of Combined DNA/RNA Molecule: Synthetic oligonucleotide
ucauuccacugcuccuugutt

SEQ ID NO: 2059 - RNA, 19 nt, Artificial Sequence
  Description of Artificial Sequence: Synthetic oligonucleotide
ggacgguacuaccagauaa

SEQ ID NO: 2060 - RNA, 19 nt, Artificial Sequence
  Description of Artificial Sequence: Synthetic oligonucleotide
gacgguacuaccagauaaa

SEQ ID NO: 2061 - RNA, 19 nt, Artificial Sequence
  Description of Artificial Sequence: Synthetic oligonucleotide
ggguuuaacugcgaaagca

SEQ ID NO: 2062 - RNA, 19 nt, Artificial Sequence
  Description of Artificial Sequence: Synthetic oligonucleotide
gguuuaacugcgaaagcaa

SEQ ID NO: 2063 - RNA, 19 nt, Artificial Sequence
  Description of Artificial Sequence: Synthetic oligonucleotide
ccgaguaggggagacuuau

SEQ ID NO: 2064 - RNA, 19 nt, Artificial Sequence
  Description of Artificial Sequence: Synthetic oligonucleotide
ccugcauacaacuagcacu

SEQ ID NO: 2065 - RNA, 19 nt, Artificial Sequence
  Description of Artificial Sequence: Synthetic oligonucleotide
gugggauaaacagcacgau

SEQ ID NO: 2066 - RNA, 19 nt, Artificial Sequence
  Description of Artificial Sequence: Synthetic oligonucleotide
gggauaaacagcacgauau

SEQ ID NO: 2067 - RNA, 19 nt, Artificial Sequence
  Description of Artificial Sequence: Synthetic oligonucleotide
caggauuccgaaacucgua

SEQ ID NO: 2068 - RNA, 19 nt, Artificial Sequence
  Description of Artificial Sequence: Synthetic oligonucleotide
cacuggaaggaagcuacca

SEQ ID NO: 2069 - RNA, 19 nt, Artificial Sequence
  Description of Artificial Sequence: Synthetic oligonucleotide
cuggauuccguguugagua

SEQ ID NO: 2070 - RNA, 19 nt, Artificial Sequence
  Description of Artificial Sequence: Synthetic oligonucleotide
guuucugacgucaagguca

SEQ ID NO: 2071 - RNA, 19 nt, Artificial Sequence
  Description of Artificial Sequence: Synthetic oligonucleotide
ggaacgaccuaucucuuua

SEQ ID NO: 2072 - RNA, 19 nt, Artificial Sequence
  Description of Artificial Sequence: Synthetic oligonucleotide
cucaggauaccgacugacu

SEQ ID NO: 2073 - RNA, 19 nt, Artificial Sequence
  Description of Artificial Sequence: Synthetic oligonucleotide
ggcccuucugcuacuaagu

SEQ ID NO: 2074 - RNA, 19 nt, Artificial Sequence
  Description of Artificial Sequence: Synthetic oligonucleotide
gagucuucacaacguauca

SEQ ID NO: 2075 - RNA, 19 nt, Artificial Sequence
  Description of Artificial Sequence: Synthetic oligonucleotide
gaccuaagcuuuguugaca

SEQ ID NO: 2076 - RNA, 19 nt, Artificial Sequence
  Description of Artificial Sequence: Synthetic oligonucleotide
gagguggaccccguuaaau

SEQ ID NO: 2077 - RNA, 19 nt, Artificial Sequence
  Description of Artificial Sequence: Synthetic oligonucleotide
ggugagagucuacaguguu

SEQ ID NO: 2078 - RNA, 19 nt, Artificial Sequence
  Description of Artificial Sequence: Synthetic oligonucleotide
ggccuugacuucucggaua

SEQ ID NO: 2079 - RNA, 19 nt, Artificial Sequence
  Description of Artificial Sequence: Synthetic oligonucleotide
ccaccauuacgggcuauaa

SEQ ID NO: 2080 - RNA, 19 nt, Artificial Sequence
  Description of Artificial Sequence: Synthetic oligonucleotide
cgggcuauaagauucggca

SEQ ID NO: 2081 - RNA, 19 nt, Artificial Sequence
  Description of Artificial Sequence: Synthetic oligonucleotide
gggcuauaagauucggcau

SEQ ID NO: 2082 - RNA, 19 nt, Artificial Sequence
  Description of Artificial Sequence: Synthetic oligonucleotide
cccagaugcaaguuaccga

SEQ ID NO: 2083 - RNA, 19 nt, Artificial Sequence
  Description of Artificial Sequence: Synthetic oligonucleotide
gccccgauguuaggacuua

SEQ ID NO: 2084 - RNA, 19 nt, Artificial Sequence
  Description of Artificial Sequence: Synthetic oligonucleotide
guuaggacuuacacuauca

SEQ ID NO: 2085 - RNA, 19 nt, Artificial Sequence
  Description of Artificial Sequence: Synthetic oligonucleotide
gaaccagggaccgaauaca

SEQ ID NO: 2086 - RNA, 19 nt, Artificial Sequence
  Description of Artificial Sequence: Synthetic oligonucleotide
cucaugagaccacaugcua

SEQ ID NO: 2087 - RNA, 19 nt, Artificial Sequence
  Description of Artificial Sequence: Synthetic oligonucleotide
gacuuuucucacgauuggu

SEQ ID NO: 2088 - RNA, 19 nt, Artificial Sequence
  Description of Artificial Sequence: Synthetic oligonucleotide
uuaucugguaguaccgucc

SEQ ID NO: 2089 - RNA, 19 nt, Artificial Sequence
  Description of Artificial Sequence: Synthetic oligonucleotide
uuuaucugguaguaccguc

SEQ ID NO: 2090 - RNA, 19 nt, Artificial Sequence
  Description of Artificial Sequence: Synthetic oligonucleotide
ugcuuucgcaguuaaaccc

SEQ ID NO: 2091 - RNA, 19 nt, Artificial Sequence
  Description of Artificial Sequence: Synthetic oligonucleotide
uugcuuucgcaguuaaacc

SEQ ID NO: 2092 - RNA, 19 nt, Artificial Sequence
  Description of Artificial Sequence: Synthetic oligonucleotide
auaagucuccccuacucgg

SEQ ID NO: 2093 - RNA, 19 nt, Artificial Sequence
  Description of Artificial Sequence: Synthetic oligonucleotide
agugcuaguuguaugcagg

SEQ ID NO: 2094 - RNA, 19 nt, Artificial Sequence
  Description of Artificial Sequence: Synthetic oligonucleotide
aucgugcuguuuaucccac

SEQ ID NO: 2095 - RNA, 19 nt, Artificial Sequence
  Description of Artificial Sequence: Synthetic oligonucleotide
auaucgugcuguuuauccc

SEQ ID NO: 2096 - RNA, 19 nt, Artificial Sequence
  Description of Artificial Sequence: Synthetic oligonucleotide
uacgaguuucggaauccug

SEQ ID NO: 2097 - RNA, 19 nt, Artificial Sequence
  Description of Artificial Sequence: Synthetic oligonucleotide
ugguagcuuccuuccagug

SEQ ID NO: 2098 - RNA, 19 nt, Artificial Sequence
  Description of Artificial Sequence: Synthetic oligonucleotide
uacucaacacggaauccag

SEQ ID NO: 2099 - RNA, 19 nt, Artificial Sequence
  Description of Artificial Sequence: Synthetic oligonucleotide
ugaccuugacgucagaaac

SEQ ID NO: 2100 - RNA, 19 nt, Artificial Sequence
  Description of Artificial Sequence: Synthetic oligonucleotide
uaaagagauaggucguucc

SEQ ID NO: 2101 - RNA, 19 nt, Artificial Sequence
  Description of Artificial Sequence: Synthetic oligonucleotide
agucagucgguauccugag

SEQ ID NO: 2102 - RNA, 19 nt, Artificial Sequence
  Description of Artificial Sequence: Synthetic oligonucleotide
acuuaguagcagaagggcc

SEQ ID NO: 2103 - RNA, 19 nt, Artificial Sequence
  Description of Artificial Sequence: Synthetic oligonucleotide
ugauacguugugaagacuc

SEQ ID NO: 2104 - RNA, 19 nt, Artificial Sequence
  Description of Artificial Sequence: Synthetic oligonucleotide
ugucaacaaagcuuagguc

SEQ ID NO: 2105 - RNA, 19 nt, Artificial Sequence
  Description of Artificial Sequence: Synthetic oligonucleotide
auuuaacgggguccaccuc

SEQ ID NO: 2106 - RNA, 19 nt, Artificial Sequence
  Description of Artificial Sequence: Synthetic oligonucleotide
aacacuguagacucucacc

SEQ ID NO: 2107 - RNA, 19 nt, Artificial Sequence
  Description of Artificial Sequence: Synthetic oligonucleotide
uauccgagaagucaaggcc

SEQ ID NO: 2108 - RNA, 19 nt, Artificial Sequence
  Description of Artificial Sequence: Synthetic oligonucleotide
uuauagcccguaauggugg

SEQ ID NO: 2109 - RNA, 19 nt, Artificial Sequence
  Description of Artificial Sequence: Synthetic oligonucleotide
ugccgaaucuuauagcccg

SEQ ID NO: 2110 - RNA, 19 nt, Artificial Sequence
  Description of Artificial Sequence: Synthetic oligonucleotide
augccgaaucuuauagccc

SEQ ID NO: 2111 - RNA, 19 nt, Artificial Sequence
  Description of Artificial Sequence: Synthetic oligonucleotide
ucgguaacuugcaucuggg

SEQ ID NO: 2112 - RNA, 19 nt, Artificial Sequence
  Description of Artificial Sequence: Synthetic oligonucleotide
uaaguccuaacaucggggc

SEQ ID NO: 2113 - RNA, 19 nt, Artificial Sequence
  Description of Artificial Sequence: Synthetic oligonucleotide
ugauaguguaaguccuaac

SEQ ID NO: 2114 - RNA, 19 nt, Artificial Sequence
  Description of Artificial Sequence: Synthetic oligonucleotide
uguauucggucccugguuc

SEQ ID NO: 2115 - RNA, 19 nt, Artificial Sequence
  Description of Artificial Sequence: Synthetic oligonucleotide
uagcauguggucucaugag

SEQ ID NO: 2116 - RNA, 19 nt, Artificial Sequence
  Description of Artificial Sequence: Synthetic oligonucleotide
accaaucgugagaaaaguc

SEQ ID NO: 2117 - RNA, 19 nt, Artificial Sequence
  Description of Artificial Sequence: Synthetic oligonucleotide
uauucaguaguacggauuu

SEQ ID NO: 2118 - RNA, 19 nt, Artificial Sequence
  Description of Artificial Sequence: Synthetic oligonucleotide
uacggauuucuauuaaguu

SEQ ID NO: 2119 - RNA, 19 nt, Artificial Sequence
  Description of Artificial Sequence: Synthetic oligonucleotide
aggaguauaccggaacaau

SEQ ID NO: 2120 - RNA, 19 nt, Artificial Sequence
  Description of Artificial Sequence: Synthetic oligonucleotide
ugaccaauggcuaagugaa

SEQ ID NO: 2121 - RNA, 19 nt, Artificial Sequence
  Description of Artificial Sequence: Synthetic oligonucleotide
guguaaugauaugugcaua

SEQ ID NO: 2122 - RNA, 19 nt, Artificial Sequence
  Description of Artificial Sequence: Synthetic oligonucleotide
guugcaucgaggcaaguuu

SEQ ID NO: 2123 - RNA, 19 nt, Artificial Sequence
  Description of Artificial Sequence: Synthetic oligonucleotide
cucaagaagcccuagauuu

SEQ ID NO: 2124 - RNA, 19 nt, Artificial Sequence
  Description of Artificial Sequence: Synthetic oligonucleotide
gacgcuacguguacuacua

SEQ ID NO: 2125 - RNA, 19 nt, Artificial Sequence
  Description of Artificial Sequence: Synthetic oligonucleotide
auguguauacguaggaauu

SEQ ID NO: 2126 - RNA, 19 nt, Artificial Sequence
  Description of Artificial Sequence: Synthetic oligonucleotide
uguguauacguaggaauuu

SEQ ID NO: 2127 - RNA, 19 nt, Artificial Sequence
  Description of Artificial Sequence: Synthetic oligonucleotide
guaccauauccggcuauuu

SEQ ID NO: 2128 - RNA, 19 nt, Artificial Sequence
  Description of Artificial Sequence: Synthetic oligonucleotide
uaccauauccggcuauuua

SEQ ID NO: 2129 - RNA, 19 nt, Artificial Sequence
  Description of Artificial Sequence: Synthetic oligonucleotide
uuagcaugcugccguaauu

SEQ ID NO: 2130 - RNA, 19 nt, Artificial Sequence
  Description of Artificial Sequence: Synthetic oligonucleotide
auaaaaguugucggugauu

SEQ ID NO: 2131 - RNA, 19 nt, Artificial Sequence
  Description of Artificial Sequence: Synthetic oligonucleotide
acgccaggcaacaucuuaa

SEQ ID NO: 2132 - RNA, 19 nt, Artificial Sequence
  Description of Artificial Sequence: Synthetic oligonucleotide
caggcaacaucuuaacauu

SEQ ID NO: 2133 - RNA, 19 nt, Artificial Sequence
  Description of Artificial Sequence: Synthetic oligonucleotide
uucuuauuaggucuucaau

SEQ ID NO: 2134 - RNA, 19 nt, Artificial Sequence
  Description of Artificial Sequence: Synthetic oligonucleotide
gaccuuacacguuguauua

SEQ ID NO: 2135 - RNA, 19 nt, Artificial Sequence
  Description of Artificial Sequence: Synthetic oligonucleotide
aaauuuacacuugcucgau

SEQ ID NO: 2136 - RNA, 19 nt, Artificial Sequence
  Description of Artificial Sequence: Synthetic oligonucleotide
agcauuaaugguaaggauu

SEQ ID NO: 2137 - RNA, 19 nt, Artificial Sequence
  Description of Artificial Sequence: Synthetic oligonucleotide
uuugggauccguuggucaa

SEQ ID NO: 2138 - RNA, 19 nt, Artificial Sequence
  Description of Artificial Sequence: Synthetic oligonucleotide
aucacauucacgauucuaa

SEQ ID NO: 2139 - RNA, 19 nt, Artificial Sequence
  Description of Artificial Sequence: Synthetic oligonucleotide
uucacgauucuaacuucua

SEQ ID NO: 2140 - RNA, 19 nt, Artificial Sequence
  Description of Artificial Sequence: Synthetic oligonucleotide
ucacgauucuaacuucuaa

SEQ ID NO: 2141 - RNA, 19 nt, Artificial Sequence
  Description of Artificial Sequence: Synthetic oligonucleotide
gacguuaacucuuacccuu

SEQ ID NO: 2142 - RNA, 19 nt, Artificial Sequence
  Description of Artificial Sequence: Synthetic oligonucleotide
uuuugaauguuucgauguu

SEQ ID NO: 2143 - RNA, 19 nt, Artificial Sequence
  Description of Artificial Sequence: Synthetic oligonucleotide
uaauuagcuugaaacgcau

SEQ ID NO: 2144 - RNA, 19 nt, Artificial Sequence
  Description of Artificial Sequence: Synthetic oligonucleotide
auugguagccccacucaaa

SEQ ID NO: 2145 - RNA, 19 nt, Artificial Sequence
  Description of Artificial Sequence: Synthetic oligonucleotide
gcaucagauguuucggcuu

SEQ ID NO: 2146 - RNA, 19 nt, Artificial Sequence
  Description of Artificial Sequence: Synthetic oligonucleotide
cccuuuaucucuuaguguu

SEQ ID NO: 2147 - RNA, 19 nt, Artificial Sequence
  Description of Artificial Sequence: Synthetic oligonucleotide
aaauccguacuacugaaua

SEQ ID NO: 2148 - RNA, 19 nt, Artificial Sequence
  Description of Artificial Sequence: Synthetic oligonucleotide
aacuuaauagaaauccgua

SEQ ID NO: 2149 - RNA, 19 nt, Artificial Sequence
  Description of Artificial Sequence: Synthetic oligonucleotide
auuguuccgguauacuccu

SEQ ID NO: 2150 - RNA, 19 nt, Artificial Sequence
  Description of Artificial Sequence: Synthetic oligonucleotide
uucacuuagccauugguca

SEQ ID NO: 2151 - RNA, 19 nt, Artificial Sequence
  Description of Artificial Sequence: Synthetic oligonucleotide
uaugcacauaucauuacac

SEQ ID NO: 2152 - RNA, 19 nt, Artificial Sequence
  Description of Artificial Sequence: Synthetic oligonucleotide
aaacuugccucgaugcaac

SEQ ID NO: 2153 - RNA, 19 nt, Artificial Sequence
  Description of Artificial Sequence: Synthetic oligonucleotide
aaaucuagggcuucuugag

SEQ ID NO: 2154 - RNA, 19 nt, Artificial Sequence
  Description of Artificial Sequence: Synthetic oligonucleotide
uaguaguacacguagcguc

SEQ ID NO: 2155 - RNA, 19 nt, Artificial Sequence
  Description of Artificial Sequence: Synthetic oligonucleotide
aauuccuacguauacacau

SEQ ID NO: 2156 - RNA, 19 nt, Artificial Sequence
  Description of Artificial Sequence: Synthetic oligonucleotide
aaauuccuacguauacaca

SEQ ID NO: 2157 - RNA, 19 nt, Artificial Sequence
  Description of Artificial Sequence: Synthetic oligonucleotide
aaauagccggauaugguac

SEQ ID NO: 2158 - RNA, 19 nt, Artificial Sequence
  Description of Artificial Sequence: Synthetic oligonucleotide
uaaauagccggauauggua

SEQ ID NO: 2159 - RNA, 19 nt, Artificial Sequence
  Description of Artificial Sequence: Synthetic oligonucleotide
aauuacggcagcaugcuaa

SEQ ID NO: 2160 - RNA, 19 nt, Artificial Sequence
  Description of Artificial Sequence: Synthetic oligonucleotide
aaucaccgacaacuuuuau

SEQ ID NO: 2161 - RNA, 19 nt, Artificial Sequence
  Description of Artificial Sequence: Synthetic oligonucleotide
uuaagauguugccuggcgu

SEQ ID NO: 2162 - RNA, 19 nt, Artificial Sequence
  Description of Artificial Sequence: Synthetic oligonucleotide
aauguuaagauguugccug

SEQ ID NO: 2163 - RNA, 19 nt, Artificial Sequence
  Description of Artificial Sequence: Synthetic oligonucleotide
auugaagaccuaauaagaa

SEQ ID NO: 2164 - RNA, 19 nt, Artificial Sequence
  Description of Artificial Sequence: Synthetic oligonucleotide
uaauacaacguguaagguc

SEQ ID NO: 2165 - RNA, 19 nt, Artificial Sequence
  Description of Artificial Sequence: Synthetic oligonucleotide
aucgagcaaguguaaauuu

SEQ ID NO: 2166 - RNA, 19 nt, Artificial Sequence
  Description of Artificial Sequence: Synthetic oligonucleotide
aauccuuaccauuaaugcu

SEQ ID NO: 2167 - RNA, 19 nt, Artificial Sequence
  Description of Artificial Sequence: Synthetic oligonucleotide
uugaccaacggaucccaaa

SEQ ID NO: 2168 - RNA, 19 nt, Artificial Sequence
  Description of Artificial Sequence: Synthetic oligonucleotide
uuagaaucgugaaugugau

SEQ ID NO: 2169 - RNA, 19 nt, Artificial Sequence
  Description of Artificial Sequence: Synthetic oligonucleotide
uagaaguuagaaucgugaa

SEQ ID NO: 2170 - RNA, 19 nt, Artificial Sequence
  Description of Artificial Sequence: Synthetic oligonucleotide
uuagaaguuagaaucguga

SEQ ID NO: 2171 - RNA, 19 nt, Artificial Sequence
  Description of Artificial Sequence: Synthetic oligonucleotide
aaggguaagaguuaacguc

SEQ ID NO: 2172 - RNA, 19 nt, Artificial Sequence
  Description of Artificial Sequence: Synthetic oligonucleotide
aacaucgaaacauucaaaa

SEQ ID NO: 2173 - RNA, 19 nt, Artificial Sequence
  Description of Artificial Sequence: Synthetic oligonucleotide
augcguuucaagcuaauua

SEQ ID NO: 2174 - RNA, 19 nt, Artificial Sequence
  Description of Artificial Sequence: Synthetic oligonucleotide
uuugaguggggcuaccaau

SEQ ID NO: 2175 - RNA, 19 nt, Artificial Sequence
  Description of Artificial Sequence: Synthetic oligonucleotide
aagccgaaacaucugaugc

SEQ ID NO: 2176 - RNA, 19 nt, Artificial Sequence
  Description of Artificial Sequence: Synthetic oligonucleotide
aacacuaagagauaaaggg

SEQ ID NO: 2177 - RNA, 19 nt, Artificial Sequence
  Description of Artificial Sequence: Synthetic oligonucleotide
ggcagaugaacuuacccuu

SEQ ID NO: 2178 - RNA, 19 nt, Artificial Sequence
  Description of Artificial Sequence: Synthetic oligonucleotide
cagaugaacuuacccuugu

SEQ ID NO: 2179 - RNA, 19 nt, Artificial Sequence
  Description of Artificial Sequence: Synthetic oligonucleotide
ggagaaagccgucuuaacu

SEQ ID NO: 2180 - RNA, 19 nt, Artificial Sequence
  Description of Artificial Sequence: Synthetic oligonucleotide
gagaaagccgucuuaacuu

SEQ ID NO: 2181 - RNA, 19 nt, Artificial Sequence
  Description of Artificial Sequence: Synthetic oligonucleotide
ccgucuuaacuugguccaa

SEQ ID NO: 2182 - RNA, 19 nt, Artificial Sequence
  Description of Artificial Sequence: Synthetic oligonucleotide
gugaaauacaguccugacu

SEQ ID NO: 2183 - RNA, 19 nt, Artificial Sequence
  Description of Artificial Sequence: Synthetic oligonucleotide
caagcugcugauugucuca

SEQ ID NO: 2184 - RNA, 19 nt, Artificial Sequence
  Description of Artificial Sequence: Synthetic oligonucleotide
gcugauugucucaaaccca

SEQ ID NO: 2185 - RNA, 19 nt, Artificial Sequence
  Description of Artificial Sequence: Synthetic oligonucleotide
gggcaugcacggaauaaaa

SEQ ID NO: 2186 - RNA, 19 nt, Artificial Sequence
  Description of Artificial Sequence: Synthetic oligonucleotide
guagugaagaugauccuaa

SEQ ID NO: 2187 - RNA, 19 nt, Artificial Sequence
  Description of Artificial Sequence: Synthetic oligonucleotide
gaagaugauccuaaaaccu

SEQ ID NO: 2188 - RNA, 19 nt, Artificial Sequence
  Description of Artificial Sequence: Synthetic oligonucleotide
cuuaauguugcacuuucca

SEQ ID NO: 2189 - RNA, 19 nt, Artificial Sequence
  Description of Artificial Sequence: Synthetic oligonucleotide
gguguauguaucucaacua

SEQ ID NO: 2190 - RNA, 19 nt, Artificial Sequence
  Description of Artificial Sequence: Synthetic oligonucleotide
ccaccuaguauuguacagu

SEQ ID NO: 2191 - RNA, 19 nt, Artificial Sequence
  Description of Artificial Sequence: Synthetic oligonucleotide
guggugugacaucaaucca

SEQ ID NO: 2192 - RNA, 19 nt, Artificial Sequence
  Description of Artificial Sequence: Synthetic oligonucleotide
caucaauccagcauugaaa

SEQ ID NO: 2193 - RNA, 19 nt, Artificial Sequence
  Description of Artificial Sequence: Synthetic oligonucleotide
guuuaaacauuagcccaga

SEQ ID NO: 2194 - RNA, 19 nt, Artificial Sequence
  Description of Artificial Sequence: Synthetic oligonucleotide
cacaggauugucaaacuau

SEQ ID NO: 2195 - RNA, 19 nt, Artificial Sequence
  Description of Artificial Sequence: Synthetic oligonucleotide
caaacuauuugacaaaccu

SEQ ID NO: 2196 - RNA, 19 nt, Artificial Sequence
  Description of Artificial Sequence: Synthetic oligonucleotide
cugccagcugaauagcuua

SEQ ID NO: 2197 - RNA, 19 nt, Artificial Sequence
  Description of Artificial Sequence: Synthetic oligonucleotide
cuguugguagguccaaaua

SEQ ID NO: 2198 - RNA, 19 nt, Artificial Sequence
  Description of Artificial Sequence: Synthetic oligonucleotide
cuucuuuggaacuugugua

SEQ ID NO: 2199 - RNA, 19 nt, Artificial Sequence
  Description of Artificial Sequence: Synthetic oligonucleotide
ggaacuuguguauaccuuu

SEQ ID NO: 2200 - RNA, 19 nt, Artificial Sequence
  Description of Artificial Sequence: Synthetic oligonucleotide
gaacuuguguauaccuuuu

SEQ ID NO: 2201 - RNA, 19 nt, Artificial Sequence
  Description of Artificial Sequence: Synthetic oligonucleotide
guacuguaucagacuaguu

SEQ ID NO: 2202 - RNA, 19 nt, Artificial Sequence
  Description of Artificial Sequence: Synthetic oligonucleotide
guuuauauaugcaacaaga

SEQ ID NO: 2203 - RNA, 19 nt, Artificial Sequence
  Description of Artificial Sequence: Synthetic oligonucleotide
aaggguaaguucaucugcc

SEQ ID NO: 2204 - RNA, 19 nt, Artificial Sequence
  Description of Artificial Sequence: Synthetic oligonucleotide
acaaggguaaguucaucug

SEQ ID NO: 2205 - RNA, 19 nt, Artificial Sequence
  Description of Artificial Sequence: Synthetic oligonucleotide
aguuaagacggcuuucucc

SEQ ID NO: 2206 - RNA, 19 nt, Artificial Sequence
  Description of Artificial Sequence: Synthetic oligonucleotide
aaguuaagacggcuuucuc

SEQ ID NO: 2207 - RNA, 19 nt, Artificial Sequence
  Description of Artificial Sequence: Synthetic oligonucleotide
uuggaccaaguuaagacgg

SEQ ID NO: 2208 - RNA, 19 nt, Artificial Sequence
  Description of Artificial Sequence: Synthetic oligonucleotide
agucaggacuguauuucac

SEQ ID NO: 2209 - RNA, 19 nt, Artificial Sequence
  Description of Artificial Sequence: Synthetic oligonucleotide
ugagacaaucagcagcuug

SEQ ID NO: 2210 - RNA, 19 nt, Artificial Sequence
  Description of Artificial Sequence: Synthetic oligonucleotide
uggguuugagacaaucagc

SEQ ID NO: 2211 - RNA, 19 nt, Artificial Sequence
  Description of Artificial Sequence: Synthetic oligonucleotide
uuuuauuccgugcaugccc

SEQ ID NO: 2212 - RNA, 19 nt, Artificial Sequence
  Description of Artificial Sequence: Synthetic oligonucleotide
uuaggaucaucuucacuac

SEQ ID NO: 2213 - RNA, 19 nt, Artificial Sequence
  Description of Artificial Sequence: Synthetic oligonucleotide
agguuuuaggaucaucuuc

SEQ ID NO: 2214 - RNA, 19 nt, Artificial Sequence
  Description of Artificial Sequence: Synthetic oligonucleotide
uggaaagugcaacauuaag

SEQ ID NO: 2215 - RNA, 19 nt, Artificial Sequence
  Description of Artificial Sequence: Synthetic oligonucleotide
uaguugagauacauacacc

SEQ ID NO: 2216 - RNA, 19 nt, Artificial Sequence
  Description of Artificial Sequence: Synthetic oligonucleotide
acuguacaauacuaggugg

SEQ ID NO: 2217 - RNA, 19 nt, Artificial Sequence
  Description of Artificial Sequence: Synthetic oligonucleotide
uggauugaugucacaccac

SEQ ID NO: 2218 - RNA, 19 nt, Artificial Sequence
  Description of Artificial Sequence: Synthetic oligonucleotide
uuucaaugcuggauugaug

SEQ ID NO: 2219 - RNA, 19 nt, Artificial Sequence
  Description of Artificial Sequence: Synthetic oligonucleotide
ucugggcuaauguuuaaac

SEQ ID NO: 2220 - RNA, 19 nt, Artificial Sequence
  Description of Artificial Sequence: Synthetic oligonucleotide
auaguuugacaauccugug

SEQ ID NO: 2221 - RNA, 19 nt, Artificial Sequence
  Description of Artificial Sequence: Synthetic oligonucleotide
agguuugucaaauaguuug

SEQ ID NO: 2222 - RNA, 19 nt, Artificial Sequence
  Description of Artificial Sequence: Synthetic oligonucleotide
uaagcuauucagcuggcag

SEQ ID NO: 2223 - RNA, 19 nt, Artificial Sequence
  Description of Artificial Sequence: Synthetic oligonucleotide
uauuuggaccuaccaacag

SEQ ID NO: 2224 - RNA, 19 nt, Artificial Sequence
  Description of Artificial Sequence: Synthetic oligonucleotide
uacacaaguuccaaagaag

SEQ ID NO: 2225 - RNA, 19 nt, Artificial Sequence
  Description of Artificial Sequence: Synthetic oligonucleotide
aaagguauacacaaguucc

SEQ ID NO: 2226 - RNA, 19 nt, Artificial Sequence
  Description of Artificial Sequence: Synthetic oligonucleotide
aaaagguauacacaaguuc

SEQ ID NO: 2227 - RNA, 19 nt, Artificial Sequence
  Description of Artificial Sequence: Synthetic oligonucleotide
aacuagucugauacaguac

SEQ ID NO: 2228 - RNA, 19 nt, Artificial Sequence
  Description of Artificial Sequence: Synthetic oligonucleotide
ucuuguugcauauauaaac

SEQ ID NO: 2229 - RNA, 19 nt, Artificial Sequence
  Description of Artificial Sequence: Synthetic oligonucleotide
acucugaaaaugcgggcau

SEQ ID NO: 2230 - RNA, 19 nt, Artificial Sequence
  Description of Artificial Sequence: Synthetic oligonucleotide
gguuccuggcguuggauua

SEQ ID NO: 2231 - RNA, 19 nt, Artificial Sequence
  Description of Artificial Sequence: Synthetic oligonucleotide
ggauuaugcucauucuuuu

SEQ ID NO: 2232 - RNA, 19 nt, Artificial Sequence
  Description of Artificial Sequence: Synthetic oligonucleotide
uuuauauagguggucauuu

SEQ ID NO: 2233 - RNA, 19 nt, Artificial Sequence
  Description of Artificial Sequence: Synthetic oligonucleotide
uauagguggucauuugguu

SEQ ID NO: 2234 - RNA, 19 nt, Artificial Sequence
  Description of Artificial Sequence: Synthetic oligonucleotide
ggucauuugguucgagaua

SEQ ID NO: 2235 - RNA, 19 nt, Artificial Sequence
  Description of Artificial Sequence: Synthetic oligonucleotide
gucauuugguucgagauaa

SEQ ID NO: 2236 - RNA, 19 nt, Artificial Sequence
  Description of Artificial Sequence: Synthetic oligonucleotide
cucuccaagauucuugcaa

SEQ ID NO: 2237 - RNA, 19 nt, Artificial Sequence
  Description of Artificial Sequence: Synthetic oligonucleotide
caggaagaguccguguuuu

SEQ ID NO: 2238 - RNA, 19 nt, Artificial Sequence
  Description of Artificial Sequence: Synthetic oligonucleotide
gagcuaaagagcucugguu

SEQ ID NO: 2239 - RNA, 19 nt, Artificial Sequence
  Description of Artificial Sequence: Synthetic oligonucleotide
aaggucuaucaugacagau

SEQ ID NO: 2240 - RNA, 19 nt, Artificial Sequence
  Description of Artificial Sequence: Synthetic oligonucleotide
cugguccagcggagaauaa

SEQ ID NO: 2241 - RNA, 19 nt, Artificial Sequence
  Description of Artificial Sequence: Synthetic oligonucleotide
gcacccagcgaacacucau

SEQ ID NO: 2242 - RNA, 19 nt, Artificial Sequence
  Description of Artificial Sequence: Synthetic oligonucleotide
acuguguuuagaccuguaa

SEQ ID NO: 2243 - RNA, 19 nt, Artificial Sequence
  Description of Artificial Sequence: Synthetic oligonucleotide
uggcuucaaacauccaguu

SEQ ID NO: 2244 - RNA, 19 nt, Artificial Sequence
  Description of Artificial Sequence: Synthetic oligonucleotide
caaagacaaaguacuccaa

SEQ ID NO: 2245 - RNA, 19 nt, Artificial Sequence
  Description of Artificial Sequence: Synthetic oligonucleotide
aagacaaaguacuccaauu

SEQ ID NO: 2246 - RNA, 19 nt, Artificial Sequence
  Description of Artificial Sequence: Synthetic oligonucleotide
agacaaaguacuccaauua

SEQ ID NO: 2247 - RNA, 19 nt, Artificial Sequence
  Description of Artificial Sequence: Synthetic oligonucleotide
gacaaaguacuccaauuau

SEQ ID NO: 2248 - RNA, 19 nt, Artificial Sequence
  Description of Artificial Sequence: Synthetic oligonucleotide
ugauccuggauauacacuu

SEQ ID NO: 2249 - RNA, 19 nt, Artificial Sequence
  Description of Artificial Sequence: Synthetic oligonucleotide
augcccgcauuuucagagu

SEQ ID NO: 2250 - RNA, 19 nt, Artificial Sequence
  Description of Artificial Sequence: Synthetic oligonucleotide
uaauccaacgccaggaacc

SEQ ID NO: 2251 - RNA, 19 nt, Artificial Sequence
  Description of Artificial Sequence: Synthetic oligonucleotide
aaaagaaugagcauaaucc

SEQ ID NO: 2252 - RNA, 19 nt, Artificial Sequence
  Description of Artificial Sequence: Synthetic oligonucleotide
aaaugaccaccuauauaaa

SEQ ID NO: 2253 - RNA, 19 nt, Artificial Sequence
  Description of Artificial Sequence: Synthetic oligonucleotide
aaccaaaugaccaccuaua

SEQ ID NO: 2254 - RNA, 19 nt, Artificial Sequence
  Description of Artificial Sequence: Synthetic oligonucleotide
uaucucgaaccaaaugacc

SEQ ID NO: 2255 - RNA, 19 nt, Artificial Sequence
  Description of Artificial Sequence: Synthetic oligonucleotide
uuaucucgaaccaaaugac

SEQ ID NO: 2256 - RNA, 19 nt, Artificial Sequence
  Description of Artificial Sequence: Synthetic oligonucleotide
uugcaagaaucuuggagag

SEQ ID NO: 2257 - RNA, 19 nt, Artificial Sequence
  Description of Artificial Sequence: Synthetic oligonucleotide
aaaacacggacucuuccug

SEQ ID NO: 2258 - RNA, 19 nt, Artificial Sequence
  Description of Artificial Sequence: Synthetic oligonucleotide
aaccagagcucuuuagcuc

SEQ ID NO: 2259 - RNA, 19 nt, Artificial Sequence
  Description of Artificial Sequence: Synthetic oligonucleotide
aucugucaugauagaccuu

SEQ ID NO: 2260 - RNA, 19 nt, Artificial Sequence
  Description of Artificial Sequence: Synthetic oligonucleotide
uuauucuccgcuggaccag

SEQ ID NO: 2261 - RNA, 19 nt, Artificial Sequence
  Description of Artificial Sequence: Synthetic oligonucleotide
augaguguucgcugggugc

SEQ ID NO: 2262 - RNA, 19 nt, Artificial Sequence
  Description of Artificial Sequence: Synthetic oligonucleotide
uuacaggucuaaacacagu

SEQ ID NO: 2263 - RNA, 19 nt, Artificial Sequence
  Description of Artificial Sequence: Synthetic oligonucleotide
aacuggauguuugaagcca

SEQ ID NO: 2264 - RNA, 19 nt, Artificial Sequence
  Description of Artificial Sequence: Synthetic oligonucleotide
uuggaguacuuugucuuug

SEQ ID NO: 2265 - RNA, 19 nt, Artificial Sequence
  Description of Artificial Sequence: Synthetic oligonucleotide
aauuggaguacuuugucuu

SEQ ID NO: 2266 - RNA, 19 nt, Artificial Sequence
  Description of Artificial Sequence: Synthetic oligonucleotide
uaauuggaguacuuugucu

SEQ ID NO: 2267 - RNA, 19 nt, Artificial Sequence
  Description of Artificial Sequence: Synthetic oligonucleotide
auaauuggaguacuuuguc

SEQ ID NO: 2268 - RNA, 19 nt, Artificial Sequence
  Description of Artificial Sequence: Synthetic oligonucleotide
aaguguauauccaggauca

SEQ ID NO: 2269 - RNA, 19 nt, Artificial Sequence
  Description of Artificial Sequence: Synthetic oligonucleotide
ucauuuaauacaggucgaa

SEQ ID NO: 2270 - RNA, 19 nt, Artificial Sequence
  Description of Artificial Sequence: Synthetic oligonucleotide
auuuaauacaggucgaauu

SEQ ID NO: 2271 - RNA, 19 nt, Artificial Sequence
  Description of Artificial Sequence: Synthetic oligonucleotide
uacaggucgaauugaacau

SEQ ID NO: 2272 - RNA, 19 nt, Artificial Sequence
  Description of Artificial Sequence: Synthetic oligonucleotide
gucgaauugaacauuuaua

SEQ ID NO: 2273 - RNA, 19 nt, Artificial Sequence
  Description of Artificial Sequence: Synthetic oligonucleotide
auauugaaggaaacaugaa

SEQ ID NO: 2274 - RNA, 19 nt, Artificial Sequence
  Description of Artificial Sequence: Synthetic oligonucleotide
ggaaacaugaaguugcacu

SEQ ID NO: 2275 - RNA, 19 nt, Artificial Sequence
  Description of Artificial Sequence: Synthetic oligonucleotide
agcuaagauuuaccuugga

SEQ ID NO: 2276 - RNA, 19 nt, Artificial Sequence
  Description of Artificial Sequence: Synthetic oligonucleotide
cuaagauuuaccuuggaca

SEQ ID NO: 2277 - RNA, 19 nt, Artificial Sequence
  Description of Artificial Sequence: Synthetic oligonucleotide
uaagauuuaccuuggacaa

SEQ ID NO: 2278 - RNA, 19 nt, Artificial Sequence
  Description of Artificial Sequence: Synthetic oligonucleotide
gagacuggggccaugccaa

SEQ ID NO: 2279 - RNA, 19 nt, Artificial Sequence
  Description of Artificial Sequence: Synthetic oligonucleotide
gggccaugccaaggacuau

SEQ ID NO: 2280 - RNA, 19 nt, Artificial Sequence
  Description of Artificial Sequence: Synthetic oligonucleotide
ugucauagcuacuggggaa

SEQ ID NO: 2281 - RNA, 19 nt, Artificial Sequence
  Description of Artificial Sequence: Synthetic oligonucleotide
accauugugugggaaggaa

SEQ ID NO: 2282 - RNA, 19 nt, Artificial Sequence
  Description of Artificial Sequence: Synthetic oligonucleotide
gugggcagauguaaagaga

SEQ ID NO: 2283 - RNA, 19 nt, Artificial Sequence
  Description of Artificial Sequence: Synthetic oligonucleotide
gauguaaagagaccggcaa

SEQ ID NO: 2284 - RNA, 19 nt, Artificial Sequence
  Description of Artificial Sequence: Synthetic oligonucleotide
gaagccccgcguugccuuu

SEQ ID NO: 2285 - RNA, 19 nt, Artificial Sequence
  Description of Artificial Sequence: Synthetic oligonucleotide
ucacauacucauuuuacuu

SEQ ID NO: 2286 - RNA, 19 nt, Artificial Sequence
  Description of Artificial Sequence: Synthetic oligonucleotide
acuugaaauuaugucacua

SEQ ID NO: 2287 - RNA, 19 nt, Artificial Sequence
  Description of Artificial Sequence: Synthetic oligonucleotide
aaauuaugucacuagacaa

SEQ ID NO: 2288 - RNA, 19 nt, Artificial Sequence
  Description of Artificial Sequence: Synthetic oligonucleotide
gagucuugagauuguuuuu

SEQ ID NO: 2289 - RNA, 19 nt, Artificial Sequence
  Description of Artificial Sequence: Synthetic oligonucleotide
uucgaccuguauuaaauga

SEQ ID NO: 2290 - RNA, 19 nt, Artificial Sequence
  Description of Artificial Sequence: Synthetic oligonucleotide
aauucgaccuguauuaaau

SEQ ID NO: 2291 - RNA, 19 nt, Artificial Sequence
  Description of Artificial Sequence: Synthetic oligonucleotide
auguucaauucgaccugua

SEQ ID NO: 2292 - RNA, 19 nt, Artificial Sequence
  Description of Artificial Sequence: Synthetic oligonucleotide
uauaaauguucaauucgac

SEQ ID NO: 2293 - RNA, 19 nt, Artificial Sequence
  Description of Artificial Sequence: Synthetic oligonucleotide
uucauguuuccuucaauau

SEQ ID NO: 2294 - RNA, 19 nt, Artificial Sequence
  Description of Artificial Sequence: Synthetic oligonucleotide
agugcaacuucauguuucc

SEQ ID NO: 2295 - RNA, 19 nt, Artificial Sequence
  Description of Artificial Sequence: Synthetic oligonucleotide
uccaagguaaaucuuagcu

SEQ ID NO: 2296 - RNA, 19 nt, Artificial Sequence
  Description of Artificial Sequence: Synthetic oligonucleotide
uguccaagguaaaucuuag

SEQ ID NO: 2297 - RNA, 19 nt, Artificial Sequence
  Description of Artificial Sequence: Synthetic oligonucleotide
uuguccaagguaaaucuua

SEQ ID NO: 2298 - RNA, 19 nt, Artificial Sequence
  Description of Artificial Sequence: Synthetic oligonucleotide
uuggcauggccccagucuc

SEQ ID NO: 2299 - RNA, 19 nt, Artificial Sequence
  Description of Artificial Sequence: Synthetic oligonucleotide
auaguccuuggcauggccc

SEQ ID NO: 2300 - RNA, 19 nt, Artificial Sequence
  Description of Artificial Sequence: Synthetic oligonucleotide
uuccccaguagcuaugaca

SEQ ID NO: 2301 - RNA, 19 nt, Artificial Sequence
  Description of Artificial Sequence: Synthetic oligonucleotide
uuccuucccacacaauggu

SEQ ID NO: 2302 - RNA, 19 nt, Artificial Sequence
  Description of Artificial Sequence: Synthetic oligonucleotide
ucucuuuacaucugcccac

SEQ ID NO: 2303 - RNA, 19 nt, Artificial Sequence
  Description of Artificial Sequence: Synthetic oligonucleotide
uugccggucucuuuacauc

SEQ ID NO: 2304 - RNA, 19 nt, Artificial Sequence
  Description of Artificial Sequence: Synthetic oligonucleotide
aaaggcaacgcggggcuuc

SEQ ID NO: 2305 - RNA, 19 nt, Artificial Sequence
  Description of Artificial Sequence: Synthetic oligonucleotide
aaguaaaaugaguauguga

SEQ ID NO: 2306 - RNA, 19 nt, Artificial Sequence
  Description of Artificial Sequence: Synthetic oligonucleotide
uagugacauaauuucaagu

SEQ ID NO: 2307 - RNA, 19 nt, Artificial Sequence
  Description of Artificial Sequence: Synthetic oligonucleotide
uugucuagugacauaauuu

SEQ ID NO: 2308 - RNA, 19 nt, Artificial Sequence
  Description of Artificial Sequence: Synthetic oligonucleotide
aaaaacaaucucaagacuc

SEQ ID NO: 2309 - RNA, 19 nt, Artificial Sequence
  Description of Artificial Sequence: Synthetic oligonucleotide
aauacaaauuucacccuaa

SEQ ID NO: 2310 - RNA, 19 nt, Artificial Sequence
  Description of Artificial Sequence: Synthetic oligonucleotide
ucuccauggucuagcauuu

SEQ ID NO: 2311 - RNA, 19 nt, Artificial Sequence
  Description of Artificial Sequence: Synthetic oligonucleotide
uccagaagcaaaucagguu

SEQ ID NO: 2312 - RNA, 19 nt, Artificial Sequence
  Description of Artificial Sequence: Synthetic oligonucleotide
gcuccagagacuaccuauu

SEQ ID NO: 2313 - RNA, 19 nt, Artificial Sequence
  Description of Artificial Sequence: Synthetic oligonucleotide
uaccuauuguuugaaaguu

SEQ ID NO: 2314 - RNA, 19 nt, Artificial Sequence
  Description of Artificial Sequence: Synthetic oligonucleotide
uuugggauaaucacuauaa

SEQ ID NO: 2315 - RNA, 19 nt, Artificial Sequence
  Description of Artificial Sequence: Synthetic oligonucleotide
ggauaaucacuauaacgaa

SEQ ID NO: 2316 - RNA, 19 nt, Artificial Sequence
  Description of Artificial Sequence: Synthetic oligonucleotide
ugaccuauaccguacagua

SEQ ID NO: 2317 - RNA, 19 nt, Artificial Sequence
  Description of Artificial Sequence: Synthetic oligonucleotide
gucuaaagacguagaagua

SEQ ID NO: 2318 - RNA, 19 nt, Artificial Sequence
  Description of Artificial Sequence: Synthetic oligonucleotide
agaaguagauccuccggua

SEQ ID NO: 2319 - RNA, 19 nt, Artificial Sequence
  Description of Artificial Sequence: Synthetic oligonucleotide
gaaguagauccuccgguaa

SEQ ID NO: 2320 - RNA, 19 nt, Artificial Sequence
  Description of Artificial Sequence: Synthetic oligonucleotide
aaaucaugagugaccuuua

SEQ ID NO: 2321 - RNA, 19 nt, Artificial Sequence
  Description of Artificial Sequence: Synthetic oligonucleotide
ugagugaccuuuaugauuu

SEQ ID NO: 2322 - RNA, 19 nt, Artificial Sequence
  Description of Artificial Sequence: Synthetic oligonucleotide
acacuuaccucugaucauu

SEQ ID NO: 2323 - RNA, 19 nt, Artificial Sequence
  Description of Artificial Sequence: Synthetic oligonucleotide
uccuguaucaagucuauaa

SEQ ID NO: 2324 - RNA, 19 nt, Artificial Sequence
  Description of Artificial Sequence: Synthetic oligonucleotide
guagaagaaccgguagaaa

SEQ ID NO: 2325 - RNA, 19 nt, Artificial Sequence
  Description of Artificial Sequence: Synthetic oligonucleotide
cgguagaaauuuguuacau

SEQ ID NO: 2326 - RNA, 19 nt, Artificial Sequence
  Description of Artificial Sequence: Synthetic oligonucleotide
acauaauugagaguaggau

SEQ ID NO: 2327 - RNA, 19 nt, Artificial Sequence
  Description of Artificial Sequence: Synthetic oligonucleotide
uaaacagagcagucgagau

SEQ ID NO: 2328 - RNA, 19 nt, Artificial Sequence
  Description of Artificial Sequence: Synthetic oligonucleotide
ucgagauucagggaauuau

SEQ ID NO: 2329 - RNA, 19 nt, Artificial Sequence
  Description of Artificial Sequence: Synthetic oligonucleotide
cgacgauaauaccucacaa

SEQ ID NO: 2330 - RNA, 19 nt, Artificial Sequence
  Description of Artificial Sequence: Synthetic oligonucleotide
cuaggaaaugacauacuau

SEQ ID NO: 2331 - RNA, 19 nt, Artificial Sequence
  Description of Artificial Sequence: Synthetic oligonucleotide
uaggaaaugacauacuaua

SEQ ID NO: 2332 - RNA, 19 nt, Artificial Sequence
  Description of Artificial Sequence: Synthetic oligonucleotide
uaugggacuuguaguauaa

SEQ ID NO: 2333 - RNA, 19 nt, Artificial Sequence
  Description of Artificial Sequence: Synthetic oligonucleotide
uugggauccucguucugaa

SEQ ID NO: 2334 - RNA, 19 nt, Artificial Sequence
  Description of Artificial Sequence: Synthetic oligonucleotide
acaccauucugacugaaua

SEQ ID NO: 2335 - RNA, 19 nt, Artificial Sequence
  Description of Artificial Sequence: Synthetic oligonucleotide
agaagagauccguaugcuu

SEQ ID NO: 2336 - RNA, 19 nt, Artificial Sequence
  Description of Artificial Sequence: Synthetic oligonucleotide
acuugaaccugauaaccuu

SEQ ID NO: 2337 - RNA, 19 nt, Artificial Sequence
  Description of Artificial Sequence: Synthetic oligonucleotide
gacagaguccuuagauuau

SEQ ID NO: 2338 - RNA, 19 nt, Artificial Sequence
  Description of Artificial Sequence: Synthetic oligonucleotide
uuagggugaaauuuguauu

SEQ ID NO: 2339 - RNA, 19 nt, Artificial Sequence
  Description of Artificial Sequence: Synthetic oligonucleotide
aaaugcuagaccauggaga

SEQ ID NO: 2340 - RNA, 19 nt, Artificial Sequence
  Description of Artificial Sequence: Synthetic oligonucleotide
aaccugauuugcuucugga

SEQ ID NO: 2341 - RNA, 19 nt, Artificial Sequence
  Description of Artificial Sequence: Synthetic oligonucleotide
aacuuucaaacaauaggua

SEQ ID NO: 2342 - RNA, 19 nt, Artificial Sequence
  Description of Artificial Sequence: Synthetic oligonucleotide
aacuuucaaacaauaggua

SEQ ID NO: 2343 - RNA, 19 nt, Artificial Sequence
  Description of Artificial Sequence: Synthetic oligonucleotide
uuauagugauuaucccaaa

SEQ ID NO: 2344 - RNA, 19 nt, Artificial Sequence
  Description of Artificial Sequence: Synthetic oligonucleotide
uucguuauagugauuaucc

SEQ ID NO: 2345 - RNA, 19 nt, Artificial Sequence
  Description of Artificial Sequence: Synthetic oligonucleotide
uacuguacgguauagguca

SEQ ID NO: 2346 - RNA, 19 nt, Artificial Sequence
  Description of Artificial Sequence: Synthetic oligonucleotide
uacuucuacgucuuuagac

SEQ ID NO: 2347 - RNA, 19 nt, Artificial Sequence
  Description of Artificial Sequence: Synthetic oligonucleotide
uaccggaggaucuacuucu

SEQ ID NO: 2348 - RNA, 19 nt, Artificial Sequence
  Description of Artificial Sequence: Synthetic oligonucleotide
uuaccggaggaucuacuuc

SEQ ID NO: 2349 - RNA, 19 nt, Artificial Sequence
  Description of Artificial Sequence: Synthetic oligonucleotide
uaaaggucacucaugauuu

SEQ ID NO: 2350 - RNA, 19 nt, Artificial Sequence
  Description of Artificial Sequence: Synthetic oligonucleotide
aaaucauaaaggucacuca

SEQ ID NO: 2351 - RNA, 19 nt, Artificial Sequence
  Description of Artificial Sequence: Synthetic oligonucleotide
aaugaucagagguaagugu

SEQ ID NO: 2352 - RNA, 19 nt, Artificial Sequence
  Description of Artificial Sequence: Synthetic oligonucleotide
uuauagacuugauacagga

SEQ ID NO: 2353 - RNA, 19 nt, Artificial Sequence
  Description of Artificial Sequence: Synthetic oligonucleotide
uuucuaccgguucuucuac

SEQ ID NO: 2354 - RNA, 19 nt, Artificial Sequence
  Description of Artificial Sequence: Synthetic oligonucleotide
auguaacaaauuucuaccg

SEQ ID NO: 2355 - RNA, 19 nt, Artificial Sequence
  Description of Artificial Sequence: Synthetic oligonucleotide
auccuacucucaauuaugu

SEQ ID NO: 2356 - RNA, 19 nt, Artificial Sequence
  Description of Artificial Sequence: Synthetic oligonucleotide
aucucgacugcucuguuua

SEQ ID NO: 2357 - RNA, 19 nt, Artificial Sequence
  Description of Artificial Sequence: Synthetic oligonucleotide
auaauucccugaaucucga

SEQ ID NO: 2358 - RNA, 19 nt, Artificial Sequence
  Description of Artificial Sequence: Synthetic oligonucleotide
uugugagguauuaucgucg

SEQ ID NO: 2359 - RNA, 19 nt, Artificial Sequence
  Description of Artificial Sequence: Synthetic oligonucleotide
auaguaugucauuuccuag

SEQ ID NO: 2360 - RNA, 19 nt, Artificial Sequence
  Description of Artificial Sequence: Synthetic oligonucleotide
uauaguaugucauuuccua

SEQ ID NO: 2361 - RNA, 19 nt, Artificial Sequence
  Description of Artificial Sequence: Synthetic oligonucleotide
uuauacuacaagucccaua

SEQ ID NO: 2362 - RNA, 19 nt, Artificial Sequence
  Description of Artificial Sequence: Synthetic oligonucleotide
uucagaacgaggaucccaa

SEQ ID NO: 2363 - RNA, 19 nt, Artificial Sequence
  Description of Artificial Sequence: Synthetic oligonucleotide
uauucagucagaauggugu

SEQ ID NO: 2364 - RNA, 19 nt, Artificial Sequence
  Description of Artificial Sequence: Synthetic oligonucleotide
aagcauacggaucucuucu

SEQ ID NO: 2365 - RNA, 19 nt, Artificial Sequence
  Description of Artificial Sequence: Synthetic oligonucleotide
aagguuaucagguucaagu

SEQ ID NO: 2366 - RNA, 19 nt, Artificial Sequence
  Description of Artificial Sequence: Synthetic oligonucleotide
auaaucuaaggacucuguc

SEQ ID NO: 2367 - RNA, 19 nt, Artificial Sequence
  Description of Artificial Sequence: Synthetic oligonucleotide
guguugaucucaguccgau

SEQ ID NO: 2368 - RNA, 19 nt, Artificial Sequence
  Description of Artificial Sequence: Synthetic oligonucleotide
uauucuuaaccgggcugau

SEQ ID NO: 2369 - RNA, 19 nt, Artificial Sequence
  Description of Artificial Sequence: Synthetic oligonucleotide
cgggcugauuguauucguu

SEQ ID NO: 2370 - RNA, 19 nt, Artificial Sequence
  Description of Artificial Sequence: Synthetic oligonucleotide
gggcugauuguauucguua

SEQ ID NO: 2371 - RNA, 19 nt, Artificial Sequence
  Description of Artificial Sequence: Synthetic oligonucleotide
ggcugauuguauucguuau

SEQ ID NO: 2372 - RNA, 19 nt, Artificial Sequence
  Description of Artificial Sequence: Synthetic oligonucleotide
augcuuucauauagccguu

SEQ ID NO: 2373 - RNA, 19 nt, Artificial Sequence
  Description of Artificial Sequence: Synthetic oligonucleotide
uuucauauagccguuagaa

SEQ ID NO: 2374 - RNA, 19 nt, Artificial Sequence
  Description of Artificial Sequence: Synthetic oligonucleotide
uucauauagccguuagaaa

SEQ ID NO: 2375 - RNA, 19 nt, Artificial Sequence
  Description of Artificial Sequence: Synthetic oligonucleotide
uagaaagagaaacgggcau

SEQ ID NO: 2376 - RNA, 19 nt, Artificial Sequence
  Description of Artificial Sequence: Synthetic oligonucleotide
cagaaaaucuuacgaaguu

SEQ ID NO: 2377 - RNA, 19 nt, Artificial Sequence
  Description of Artificial Sequence: Synthetic oligonucleotide
aauuagguucuaggagcua

SEQ ID NO: 2378 - RNA, 19 nt, Artificial Sequence
  Description of Artificial Sequence: Synthetic oligonucleotide
uagucaguugaagcgguuu

SEQ ID NO: 2379 - RNA, 19 nt, Artificial Sequence
  Description of Artificial Sequence: Synthetic oligonucleotide
caguugaagcgguuuuguu

SEQ ID NO: 2380 - RNA, 19 nt, Artificial Sequence
  Description of Artificial Sequence: Synthetic oligonucleotide
gcgguuuuguuacugcgaa

SEQ ID NO: 2381 - RNA, 19 nt, Artificial Sequence
  Description of Artificial Sequence: Synthetic oligonucleotide
uuuuguuacugcgaaguuu

SEQ ID NO: 2382 - RNA, 19 nt, Artificial Sequence
  Description of Artificial Sequence: Synthetic oligonucleotide
uuuguuacugcgaaguuuu

SEQ ID NO: 2383 - RNA, 19 nt, Artificial Sequence
  Description of Artificial Sequence: Synthetic oligonucleotide
auccaaaagcucuguguaa

SEQ ID NO: 2384 - RNA, 19 nt, Artificial Sequence
  Description of Artificial Sequence: Synthetic oligonucleotide
uccaaaagcucuguguaau

SEQ ID NO: 2385 - RNA, 19 nt, Artificial Sequence
  Description of Artificial Sequence: Synthetic oligonucleotide
cucuguguaaugaguguuu

SEQ ID NO: 2386 - RNA, 19 nt, Artificial Sequence
  Description of Artificial Sequence: Synthetic oligonucleotide
ugaccuugguccacuguaa

SEQ ID NO: 2387 - RNA, 19 nt, Artificial Sequence
  Description of Artificial Sequence: Synthetic oligonucleotide
gaccuugguccacuguaaa

SEQ ID NO: 2388 - RNA, 19 nt, Artificial Sequence
  Description of Artificial Sequence: Synthetic oligonucleotide
gaggcauccgauucaacaa

SEQ ID NO: 2389 - RNA, 19 nt, Artificial Sequence
  Description of Artificial Sequence: Synthetic oligonucleotide
uccgauucaacaacgaaau

SEQ ID NO: 2390 - RNA, 19 nt, Artificial Sequence
  Description of Artificial Sequence: Synthetic oligonucleotide
gauucaacaacgaaaugua

SEQ ID NO: 2391 - RNA, 19 nt, Artificial Sequence
  Description of Artificial Sequence: Synthetic oligonucleotide
aaaauuggacuguuacguu

SEQ ID NO: 2392 - RNA, 19 nt, Artificial Sequence
  Description of Artificial Sequence: Synthetic oligonucleotide
uuacguuccacuuaaaguu

SEQ ID NO: 2393 - RNA, 19 nt, Artificial Sequence
  Description of Artificial Sequence: Synthetic oligonucleotide
aaguguaaagggauccguu

SEQ ID NO: 2394 - RNA, 19 nt, Artificial Sequence
  Description of Artificial Sequence: Synthetic oligonucleotide
aguguaaagggauccguua

SEQ ID NO: 2395 - RNA, 19 nt, Artificial Sequence
  Description of Artificial Sequence: Synthetic oligonucleotide
guguaaagggauccguuau

SEQ ID NO: 2396 - RNA, 19 nt, Artificial Sequence
  Description of Artificial Sequence: Synthetic oligonucleotide
gauccguuaugcucuuuua

SEQ ID NO: 2397 - RNA, 19 nt, Artificial Sequence
  Description of Artificial Sequence: Synthetic oligonucleotide
auccguuaugcucuuuuau

SEQ ID NO: 2398 - RNA, 19 nt, Artificial Sequence
  Description of Artificial Sequence: Synthetic oligonucleotide
uccguuaugcucuuuuauu

SEQ ID NO: 2399 - RNA, 19 nt, Artificial Sequence
  Description of Artificial Sequence: Synthetic oligonucleotide
ccguuaugcucuuuuauua

SEQ ID NO: 2400 - RNA, 19 nt, Artificial Sequence
  Description of Artificial Sequence: Synthetic oligonucleotide
cguuaugcucuuuuauuaa

SEQ ID NO: 2401 - RNA, 19 nt, Artificial Sequence
  Description of Artificial Sequence: Synthetic oligonucleotide
aucggacugagaucaacac

SEQ ID NO: 2402 - RNA, 19 nt, Artificial Sequence
  Description of Artificial Sequence: Synthetic oligonucleotide
aucagcccgguuaagaaua

SEQ ID NO: 2403 - RNA, 19 nt, Artificial Sequence
  Description of Artificial Sequence: Synthetic oligonucleotide
aacgaauacaaucagcccg

SEQ ID NO: 2404 - RNA, 19 nt, Artificial Sequence
  Description of Artificial Sequence: Synthetic oligonucleotide
uaacgaauacaaucagccc

SEQ ID NO: 2405 - RNA, 19 nt, Artificial Sequence
  Description of Artificial Sequence: Synthetic oligonucleotide
auaacgaauacaaucagcc

SEQ ID NO: 2406 - RNA, 19 nt, Artificial Sequence
  Description of Artificial Sequence: Synthetic oligonucleotide
aacggcuauaugaaagcau

SEQ ID NO: 2407 - RNA, 19 nt, Artificial Sequence
  Description of Artificial Sequence: Synthetic oligonucleotide
uucuaacggcuauaugaaa

SEQ ID NO: 2408 - RNA, 19 nt, Artificial Sequence
  Description of Artificial Sequence: Synthetic oligonucleotide
uuucuaacggcuauaugaa

SEQ ID NO: 2409 - RNA, 19 nt, Artificial Sequence
  Description of Artificial Sequence: Synthetic oligonucleotide
augcccguuucucuuucua

SEQ ID NO: 2410 - RNA, 19 nt, Artificial Sequence
  Description of Artificial Sequence: Synthetic oligonucleotide
aacuucguaagauuuucug

SEQ ID NO: 2411 - RNA, 19 nt, Artificial Sequence
  Description of Artificial Sequence: Synthetic oligonucleotide
uagcuccuagaaccuaauu

SEQ ID NO: 2412 - RNA, 19 nt, Artificial Sequence
  Description of Artificial Sequence: Synthetic oligonucleotide
aaaccgcuucaacugacua

SEQ ID NO: 2413 - RNA, 19 nt, Artificial Sequence
  Description of Artificial Sequence: Synthetic oligonucleotide
aacaaaaccgcuucaacug

SEQ ID NO: 2414 - RNA, 19 nt, Artificial Sequence
  Description of Artificial Sequence: Synthetic oligonucleotide
uucgcaguaacaaaaccgc

SEQ ID NO: 2415 - RNA, 19 nt, Artificial Sequence
  Description of Artificial Sequence: Synthetic oligonucleotide
aaacuucgcaguaacaaaa

SEQ ID NO: 2416 - RNA, 19 nt, Artificial Sequence
  Description of Artificial Sequence: Synthetic oligonucleotide
aaaacuucgcaguaacaaa

SEQ ID NO: 2417 - RNA, 19 nt, Artificial Sequence
  Description of Artificial Sequence: Synthetic oligonucleotide
uuacacagagcuuuuggau

SEQ ID NO: 2418 - RNA, 19 nt, Artificial Sequence
  Description of Artificial Sequence: Synthetic oligonucleotide
auuacacagagcuuuugga

SEQ ID NO: 2419 - RNA, 19 nt, Artificial Sequence
  Description of Artificial Sequence: Synthetic oligonucleotide
aaacacucauuacacagag

SEQ ID NO: 2420 - RNA, 19 nt, Artificial Sequence
  Description of Artificial Sequence: Synthetic oligonucleotide
uuacaguggaccaagguca

SEQ ID NO: 2421 - RNA, 19 nt, Artificial Sequence
  Description of Artificial Sequence: Synthetic oligonucleotide
uuuacaguggaccaagguc

SEQ ID NO: 2422 - RNA, 19 nt, Artificial Sequence
  Description of Artificial Sequence: Synthetic oligonucleotide
uuguugaaucggaugccuc

SEQ ID NO: 2423 - RNA, 19 nt, Artificial Sequence
  Description of Artificial Sequence: Synthetic oligonucleotide
auuucguuguugaaucgga

SEQ ID NO: 2424 - RNA, 19 nt, Artificial Sequence
  Description of Artificial Sequence: Synthetic oligonucleotide
uacauuucguuguugaauc

SEQ ID NO: 2425 - RNA, 19 nt, Artificial Sequence
  Description of Artificial Sequence: Synthetic oligonucleotide
aacguaacaguccaauuuu

SEQ ID NO: 2426 - RNA, 19 nt, Artificial Sequence
  Description of Artificial Sequence: Synthetic oligonucleotide
aacuuuaaguggaacguaa

SEQ ID NO: 2427 - RNA, 19 nt, Artificial Sequence
  Description of Artificial Sequence: Synthetic oligonucleotide
aacggaucccuuuacacuu

SEQ ID NO: 2428 - RNA, 19 nt, Artificial Sequence
  Description of Artificial Sequence: Synthetic oligonucleotide
uaacggaucccuuuacacu

SEQ ID NO: 2429 - RNA, 19 nt, Artificial Sequence
  Description of Artificial Sequence: Synthetic oligonucleotide
auaacggaucccuuuacac

SEQ ID NO: 2430 - RNA, 19 nt, Artificial Sequence
  Description of Artificial Sequence: Synthetic oligonucleotide
uaaaagagcauaacggauc

SEQ ID NO: 2431 - RNA, 19 nt, Artificial Sequence
  Description of Artificial Sequence: Synthetic oligonucleotide
auaaaagagcauaacggau

SEQ ID NO: 2432 - RNA, 19 nt, Artificial Sequence
  Description of Artificial Sequence: Synthetic oligonucleotide
aauaaaagagcauaacgga

SEQ ID NO: 2433 - RNA, 19 nt, Artificial Sequence
  Description of Artificial Sequence: Synthetic oligonucleotide
uaauaaaagagcauaacgg

SEQ ID NO: 2434 - RNA, 19 nt, Artificial Sequence
  Description of Artificial Sequence: Synthetic oligonucleotide
uuaauaaaagagcauaacg
